United States Patent Application Publication US 2022/0403035 A1 - sequence listing, part 2

SEQ ID NO: 3408 - protein, 106 aa, Artificial Sequence
  Synthetic
EIVMTQSPATLSVSPGERATLTCRASSSVSYMHWYQQKPGQAPRLLIYGTSNLVSGVPARFSGSGSGTEFTLTISSLQSEDFAVYYCQQWSSYPLTFGCGTKVEIK

SEQ ID NO: 3409 - protein, 238 aa, Artificial Sequence
  Synthetic
EVQLLESGGGLVQPGGSLRLSCAASGFTFSSYWMHWVRQTPGKCLEWVSKIDPSDDYTNYNQKVKGRFTISIDKSKNTLYLQMNSLRAEDTAVYYCARWDYSHFDVWGQGTTVTVSSGGGGSGGGGSGGGGSEIVMTQSPATLSVSPGERATLTCRASSSVSYMHWYQQKPGQAPRLLIYGTSNLVSGVPARFSGSGSGTEFTLTISSLQSEDFAVYYCQQWSSYPLTFGCGTKVEIK

SEQ ID NO: 3410 - protein, 493 aa, Artificial Sequence
  Synthetic
EVQLLESGGGLVQPGGSLRLSCAASGFTFSSYWMHWVRQTPGKCLEWVSKIDPSDDYTNYNQKVKGRFTISIDKSKNTLYLQMNSLRAEDTAVYYCARWDYSHFDVWGQGTTVTVSSGGGGSGGGGSGGGGSEIVMTQSPATLSVSPGERATLTCRASSSVSYMHWYQQKPGQAPRLLIYGTSNLVSGVPARFSGSGSGTEFTLTISSLQSEDFAVYYCQQWSSYPLTFGCGTKVEIKSGGGGSEVQLVESGGGLVQPGGSLKLSCAASGFTFNKYAMNWVRQAPGKGLEWVARIRSKYNNYATYYADSVKDRFTISRDDSKNTAYLQMNNLKTEDTAVYYCVRHGNFGNSYISYWAYWGQGTLVTVSSGGGGSGGGGSGGGGSQTVVTQEPSLTVSPGGTVTLTCGSSTGAVTSGNYPNWVQQKPGQAPRGLIGGTKFLAPGTPARFSGSLLGGKAALTLSGVQPEDEAEYYCVLWYSNRWVFGGGTKLTVL

SEQ ID NO: 3411 - protein, 981 aa, Artificial Sequence
  Synthetic
EVQLLESGGGLVQPGGSLRLSCAASGFTFSSYWMHWVRQTPGKCLEWVSKIDPSDDYTNYNQKVKGRFTISIDKSKNTLYLQMNSLRAEDTAVYYCARWDYSHFDVWGQGTTVTVSSGGGGSGGGGSGGGGSEIVMTQSPATLSVSPGERATLTCRASSSVSYMHWYQQKPGQAPRLLIYGTSNLVSGVPARFSGSGSGTEFTLTISSLQSEDFAVYYCQQWSSYPLTFGCGTKVEIKSGGGGSEVQLVESGGGLVQPGGSLKLSCAASGFTFNKYAMNWVRQAPGKGLEWVARIRSKYNNYATYYADSVKDRFTISRDDSKNTAYLQMNNLKTEDTAVYYCVRHGNFGNSYISYWAYWGQGTLVTVSSGGGGSGGGGSGGGGSQTVVTQEPSLTVSPGGTVTLTCGSSTGAVTSGNYPNWVQQKPGQAPRGLIGGTKFLAPGTPARFSGSLLGGKAALTLSGVQPEDEAEYYCVLWYSNRWVFGGGTKLTVLGGGGDKTHTCPPCPAPELLGGPSVFLFPPKPKDTLMISRTPEVTCVVVDVSHEDPEVKFNWYVDGVEVHNAKTKPCEEQYGSTYRCVSVLTVLHQDWLNGKEYKCKVSNKALPAPIEKTISKAKGQPREPQVYTLPPSREEMTKNQVSLTCLVKGFYPSDIAVEWESNGQPENNYKTTPPVLDSDGSFFLYSKLTVDKSRWQQGNVFSCSVMHEALHNHYTQKSLSLSPGKGGGGSGGGGSGGGGSGGGGSGGGGSGGGGSDKTHTCPPCPAPELLGGPSVFLFPPKPKDTLMISRTPEVTCVVVDVSHEDPEVKFNWYVDGVEVHNAKTKPCEEQYGSTYRCVSVLTVLHQDWLNGKEYKCKVSNKALPAPIEKTISKAKGQPREPQVYTLPPSREEMTKNQVSLTCLVKGFYPSDIAVEWESNGQPENNYKTTPPVLDSDGSFFLYSKLTVDKSRWQQGNVFSCSVMHEALHNHYTQKSLSLSPGK

SEQ ID NO: 3412 - protein, 5 aa, Artificial Sequence
  Synthetic
SYWMH

SEQ ID NO: 3413 - protein, 17 aa, Artificial Sequence
  Synthetic
VISGSKSYTIYNQKVKG

SEQ ID NO: 3414 - protein, 8 aa, Artificial Sequence
  Synthetic
SGPGYFDV

SEQ ID NO: 3415 - protein, 11 aa, Artificial Sequence
  Synthetic
RASENIYSYLA

SEQ ID NO: 3416 - protein, 7 aa, Artificial Sequence
  Synthetic
NAKTLAE

SEQ ID NO: 3417 - protein, 9 aa, Artificial Sequence
  Synthetic
QHLNMTPYT

SEQ ID NO: 3418 - protein, 117 aa, Artificial Sequence
  Synthetic
EVQLLESGGGLVQPGGSLRLSCAASGYTFSSYWMHWVRQAPGKCLEWMGVISGSKSYTIYNQKVKGRFTISRDNSKNTVYLQMNSLRAGDTAVYYCARSGPGYFDVWGQGTMVTVSS

SEQ ID NO: 3419 - protein, 107 aa, Artificial Sequence
  Synthetic
DIQLTQSPSFLSASVGDRVTITCRASENIYSYLAWYQQKPGKAPKLLIYNAKTLAEGVPSRFSGSGSGTEFTLTISSLQPEDFGTYYCQHLNMTPYTFGCGTKLEIK

SEQ ID NO: 3420 - protein, 239 aa, Artificial Sequence
  Synthetic
EVQLLESGGGLVQPGGSLRLSCAASGYTFSSYWMHWVRQAPGKCLEWMGVISGSKSYTIYNQKVKGRFTISRDNSKNTVYLQMNSLRAGDTAVYYCARSGPGYFDVWGQGTMVTVSSGGGGSGGGGSGGGGSDIQLTQSPSFLSASVGDRVTITCRASENIYSYLAWYQQKPGKAPKLLIYNAKTLAEGVPSRFSGSGSGTEFTLTISSLQPEDFGTYYCQHLNMTPYTFGCGTKLEIK

SEQ ID NO: 3421 - protein, 494 aa, Artificial Sequence
  Synthetic
EVQLLESGGGLVQPGGSLRLSCAASGYTFSSYWMHWVRQAPGKCLEWMGVISGSKSYTIYNQKVKGRFTISRDNSKNTVYLQMNSLRAGDTAVYYCARSGPGYFDVWGQGTMVTVSSGGGGSGGGGSGGGGSDIQLTQSPSFLSASVGDRVTITCRASENIYSYLAWYQQKPGKAPKLLIYNAKTLAEGVPSRFSGSGSGTEFTLTISSLQPEDFGTYYCQHLNMTPYTFGCGTKLEIKSGGGGSEVQLVESGGGLVQPGGSLKLSCAASGFTFNKYAMNWVRQAPGKGLEWVARIRSKYNNYATYYADSVKDRFTISRDDSKNTAYLQMNNLKTEDTAVYYCVRHGNFGNSYISYWAYWGQGTLVTVSSGGGGSGGGGSGGGGSQTVVTQEPSLTVSPGGTVTLTCGSSTGAVTSGNYPNWVQQKPGQAPRGLIGGTKFLAPGTPARFSGSLLGGKAALTLSGVQPEDEAEYYCVLWYSNRWVFGGGTKLTVL

SEQ ID NO: 3422 - protein, 982 aa, Artificial Sequence
  Synthetic
EVQLLESGGGLVQPGGSLRLSCAASGYTFSSYWMHWVRQAPGKCLEWMGVISGSKSYTIYNQKVKGRFTISRDNSKNTVYLQMNSLRAGDTAVYYCARSGPGYFDVWGQGTMVTVSSGGGGSGGGGSGGGGSDIQLTQSPSFLSASVGDRVTITCRASENIYSYLAWYQQKPGKAPKLLIYNAKTLAEGVPSRFSGSGSGTEFTLTISSLQPEDFGTYYCQHLNMTPYTFGCGTKLEIKSGGGGSEVQLVESGGGLVQPGGSLKLSCAASGFTFNKYAMNWVRQAPGKGLEWVARIRSKYNNYATYYADSVKDRFTISRDDSKNTAYLQMNNLKTEDTAVYYCVRHGNFGNSYISYWAYWGQGTLVTVSSGGGGSGGGGSGGGGSQTVVTQEPSLTVSPGGTVTLTCGSSTGAVTSGNYPNWVQQKPGQAPRGLIGGTKFLAPGTPARFSGSLLGGKAALTLSGVQPEDEAEYYCVLWYSNRWVFGGGTKLTVLGGGGDKTHTCPPCPAPELLGGPSVFLFPPKPKDTLMISRTPEVTCVVVDVSHEDPEVKFNWYVDGVEVHNAKTKPCEEQYGSTYRCVSVLTVLHQDWLNGKEYKCKVSNKALPAPIEKTISKAKGQPREPQVYTLPPSREEMTKNQVSLTCLVKGFYPSDIAVEWESNGQPENNYKTTPPVLDSDGSFFLYSKLTVDKSRWQQGNVFSCSVMHEALHNHYTQKSLSLSPGKGGGGSGGGGSGGGGSGGGGSGGGGSGGGGSDKTHTCPPCPAPELLGGPSVFLFPPKPKDTLMISRTPEVTCVVVDVSHEDPEVKFNWYVDGVEVHNAKTKPCEEQYGSTYRCVSVLTVLHQDWLNGKEYKCKVSNKALPAPIEKTISKAKGQPREPQVYTLPPSREEMTKNQVSLTCLVKGFYPSDIAVEWESNGQPENNYKTTPPVLDSDGSFFLYSKLTVDKSRWQQGNVFSCSVMHEALHNHYTQKSLSLSPGK

SEQ ID NO: 3423 - protein, 5 aa, Artificial Sequence
  Synthetic
SYPIN

SEQ ID NO: 3424 - protein, 16 aa, Artificial Sequence
  Synthetic
VIWTGGGTNYASSVKG

SEQ ID NO: 3425 - protein, 15 aa, Artificial Sequence
  Synthetic
SRGVYDFDLRGAMDY

SEQ ID NO: 3426 - protein, 17 aa, Artificial Sequence
  Synthetic
KSSQSLLYSSNQKNYFA

SEQ ID NO: 3427 - protein, 7 aa, Artificial Sequence
  Synthetic
WASTRES

SEQ ID NO: 3428 - protein, 9 aa, Artificial Sequence
  Synthetic
QQYYSYPYT

SEQ ID NO: 3429 - protein, 123 aa, Artificial Sequence
  Synthetic
EVQLLESGGGLVQPGGSLRLSCAASGFSFSSYPINWVRQAPGKCLEWVGVIWTGGGTNYASSVKGRFTISRDNSKNTVYLQMNSLRAEDTAVYYCAKSRGVYDFDLRGAMDYWGQGTLVTVSS

SEQ ID NO: 3430 - protein, 113 aa, Artificial Sequence; identical to SEQ ID NO: 3353
  Synthetic

SEQ ID NO: 3431 - protein, 251 aa, Artificial Sequence
  Synthetic
EVQLLESGGGLVQPGGSLRLSCAASGFSFSSYPINWVRQAPGKCLEWVGVIWTGGGTNYASSVKGRFTISRDNSKNTVYLQMNSLRAEDTAVYYCAKSRGVYDFDLRGAMDYWGQGTLVTVSSGGGGSGGGGSGGGGSDIVMTQSPDSLAVSLGERATINCKSSQSLLYSSNQKNYFAWYQQKPGQPPKLLIYWASTRESGVPDRFSGSGSGTDFTLTISSLQAEDVAVYYCQQYYSYPYTFGCGTKLEIK

SEQ ID NO: 3432 - protein, 506 aa, Artificial Sequence
  Synthetic
EVQLLESGGGLVQPGGSLRLSCAASGFSFSSYPINWVRQAPGKCLEWVGVIWTGGGTNYASSVKGRFTISRDNSKNTVYLQMNSLRAEDTAVYYCAKSRGVYDFDLRGAMDYWGQGTLVTVSSGGGGSGGGGSGGGGSDIVMTQSPDSLAVSLGERATINCKSSQSLLYSSNQKNYFAWYQQKPGQPPKLLIYWASTRESGVPDRFSGSGSGTDFTLTISSLQAEDVAVYYCQQYYSYPYTFGCGTKLEIKSGGGGSEVQLVESGGGLVQPGGSLKLSCAASGFTFNKYAMNWVRQAPGKGLEWVARIRSKYNNYATYYADSVKDRFTISRDDSKNTAYLQMNNLKTEDTAVYYCVRHGNFGNSYISYWAYWGQGTLVTVSSGGGGSGGGGSGGGGSQTVVTQEPSLTVSPGGTVTLTCGSSTGAVTSGNYPNWVQQKPGQAPRGLIGGTKFLAPGTPARFSGSLLGGKAALTLSGVQPEDEAEYYCVLWYSNRWVFGGGTKLTVL

SEQ ID NO: 3433 - protein, 994 aa, Artificial Sequence
  Synthetic
EVQLLESGGGLVQPGGSLRLSCAASGFSFSSYPINWVRQAPGKCLEWVGVIWTGGGTNYASSVKGRFTISRDNSKNTVYLQMNSLRAEDTAVYYCAKSRGVYDFDLRGAMDYWGQGTLVTVSSGGGGSGGGGSGGGGSDIVMTQSPDSLAVSLGERATINCKSSQSLLYSSNQKNYFAWYQQKPGQPPKLLIYWASTRESGVPDRFSGSGSGTDFTLTISSLQAEDVAVYYCQQYYSYPYTFGCGTKLEIKSGGGGSEVQLVESGGGLVQPGGSLKLSCAASGFTFNKYAMNWVRQAPGKGLEWVARIRSKYNNYATYYADSVKDRFTISRDDSKNTAYLQMNNLKTEDTAVYYCVRHGNFGNSYISYWAYWGQGTLVTVSSGGGGSGGGGSGGGGSQTVVTQEPSLTVSPGGTVTLTCGSSTGAVTSGNYPNWVQQKPGQAPRGLIGGTKFLAPGTPARFSGSLLGGKAALTLSGVQPEDEAEYYCVLWYSNRWVFGGGTKLTVLGGGGDKTHTCPPCPAPELLGGPSVFLFPPKPKDTLMISRTPEVTCVVVDVSHEDPEVKFNWYVDGVEVHNAKTKPCEEQYGSTYRCVSVLTVLHQDWLNGKEYKCKVSNKALPAPIEKTISKAKGQPREPQVYTLPPSREEMTKNQVSLTCLVKGFYPSDIAVEWESNGQPENNYKTTPPVLDSDGSFFLYSKLTVDKSRWQQGNVFSCSVMHEALHNHYTQKSLSLSPGKGGGGSGGGGSGGGGSGGGGSGGGGSGGGGSDKTHTCPPCPAPELLGGPSVFLFPPKPKDTLMISRTPEVTCVVVDVSHEDPEVKFNWYVDGVEVHNAKTKPCEEQYGSTYRCVSVLTVLHQDWLNGKEYKCKVSNKALPAPIEKTISKAKGQPREPQVYTLPPSREEMTKNQVSLTCLVKGFYPSDIAVEWESNGQPENNYKTTPPVLDSDGSFFLYSKLTVDKSRWQQGNVFSCSVMHEALHNHYTQKSLSLSPGK

SEQ ID NO: 3434 - protein, 5 aa, Artificial Sequence
  Synthetic
SYWMH

SEQ ID NO: 3435 - protein, 17 aa, Artificial Sequence
  Synthetic
KIDPSDDYTNYNQKVKG

SEQ ID NO: 3436 - protein, 8 aa, Artificial Sequence
  Synthetic
WDYNYFDV

SEQ ID NO: 3437 - protein, 10 aa, Artificial Sequence
  Synthetic
RASSSVSYMH

SEQ ID NO: 3438 - protein, 7 aa, Artificial Sequence
  Synthetic
GTSNLVS

SEQ ID NO: 3439 - protein, 9 aa, Artificial Sequence
  Synthetic
QQWSSYPLT

SEQ ID NO: 3440 - protein, 117 aa, Artificial Sequence
  Synthetic
EVQLLESGGGLVQPGGSLRLSCAASGFTFSSYWMHWVRQTPGKCLEWVSKIDPSDDYTNYNQKVKGRFTISIDKSKNTLYLQMNSLRAEDTAVYYCARWDYNYFDVWGQGTTVTVSS

SEQ ID NO: 3441 - protein, 106 aa, Artificial Sequence; identical to SEQ ID NO: 3408
  Synthetic

SEQ ID NO: 3442 - protein, 238 aa, Artificial Sequence
  Synthetic
EVQLLESGGGLVQPGGSLRLSCAASGFTFSSYWMHWVRQTPGKCLEWVSKIDPSDDYTNYNQKVKGRFTISIDKSKNTLYLQMNSLRAEDTAVYYCARWDYNYFDVWGQGTTVTVSSGGGGSGGGGSGGGGSEIVMTQSPATLSVSPGERATLTCRASSSVSYMHWYQQKPGQAPRLLIYGTSNLVSGVPARFSGSGSGTEFTLTISSLQSEDFAVYYCQQWSSYPLTFGCGTKVEIK

SEQ ID NO: 3443 - protein, 493 aa, Artificial Sequence
  Synthetic
EVQLLESGGGLVQPGGSLRLSCAASGFTFSSYWMHWVRQTPGKCLEWVSKIDPSDDYTNYNQKVKGRFTISIDKSKNTLYLQMNSLRAEDTAVYYCARWDYNYFDVWGQGTTVTVSSGGGGSGGGGSGGGGSEIVMTQSPATLSVSPGERATLTCRASSSVSYMHWYQQKPGQAPRLLIYGTSNLVSGVPARFSGSGSGTEFTLTISSLQSEDFAVYYCQQWSSYPLTFGCGTKVEIKSGGGGSEVQLVESGGGLVQPGGSLKLSCAASGFTFNKYAMNWVRQAPGKGLEWVARIRSKYNNYATYYADSVKDRFTISRDDSKNTAYLQMNNLKTEDTAVYYCVRHGNFGNSYISYWAYWGQGTLVTVSSGGGGSGGGGSGGGGSQTVVTQEPSLTVSPGGTVTLTCGSSTGAVTSGNYPNWVQQKPGQAPRGLIGGTKFLAPGTPARFSGSLLGGKAALTLSGVQPEDEAEYYCVLWYSNRWVFGGGTKLTVL

SEQ ID NO: 3444 - protein, 981 aa, Artificial Sequence
  Synthetic
EVQLLESGGGLVQPGGSLRLSCAASGFTFSSYWMHWVRQTPGKCLEWVSKIDPSDDYTNYNQKVKGRFTISIDKSKNTLYLQMNSLRAEDTAVYYCARWDYNYFDVWGQGTTVTVSSGGGGSGGGGSGGGGSEIVMTQSPATLSVSPGERATLTCRASSSVSYMHWYQQKPGQAPRLLIYGTSNLVSGVPARFSGSGSGTEFTLTISSLQSEDFAVYYCQQWSSYPLTFGCGTKVEIKSGGGGSEVQLVESGGGLVQPGGSLKLSCAASGFTFNKYAMNWVRQAPGKGLEWVARIRSKYNNYATYYADSVKDRFTISRDDSKNTAYLQMNNLKTEDTAVYYCVRHGNFGNSYISYWAYWGQGTLVTVSSGGGGSGGGGSGGGGSQTVVTQEPSLTVSPGGTVTLTCGSSTGAVTSGNYPNWVQQKPGQAPRGLIGGTKFLAPGTPARFSGSLLGGKAALTLSGVQPEDEAEYYCVLWYSNRWVFGGGTKLTVLGGGGDKTHTCPPCPAPELLGGPSVFLFPPKPKDTLMISRTPEVTCVVVDVSHEDPEVKFNWYVDGVEVHNAKTKPCEEQYGSTYRCVSVLTVLHQDWLNGKEYKCKVSNKALPAPIEKTISKAKGQPREPQVYTLPPSREEMTKNQVSLTCLVKGFYPSDIAVEWESNGQPENNYKTTPPVLDSDGSFFLYSKLTVDKSRWQQGNVFSCSVMHEALHNHYTQKSLSLSPGKGGGGSGGGGSGGGGSGGGGSGGGGSGGGGSDKTHTCPPCPAPELLGGPSVFLFPPKPKDTLMISRTPEVTCVVVDVSHEDPEVKFNWYVDGVEVHNAKTKPCEEQYGSTYRCVSVLTVLHQDWLNGKEYKCKVSNKALPAPIEKTISKAKGQPREPQVYTLPPSREEMTKNQVSLTCLVKGFYPSDIAVEWESNGQPENNYKTTPPVLDSDGSFFLYSKLTVDKSRWQQGNVFSCSVMHEALHNHYTQKSLSLSPGK

SEQ ID NO: 3445 - protein, 5 aa, Artificial Sequence
  Synthetic
SSWMN

SEQ ID NO: 3446 - protein, 17 aa, Artificial Sequence
  Synthetic
RIYMGDAETKYNDKVKG

SEQ ID NO: 3447 - protein, 12 aa, Artificial Sequence
  Synthetic
QRDYGALYAMDY

SEQ ID NO: 3448 - protein, 11 aa, Artificial Sequence
  Synthetic
RASDDIYSYLA

SEQ ID NO: 3449 - protein, 7 aa, Artificial Sequence
  Synthetic
NSKTLAE

SEQ ID NO: 3450 - protein, 9 aa, Artificial Sequence
  Synthetic
QNHVYFPQT

SEQ ID NO: 3451 - protein, 121 aa, Artificial Sequence
  Synthetic
EVQLLESGGGLVQPGGSLRLSCAASGFTFSSSWMNWVRQAPGKCLEWVGRIYMGDAETKYNDKVKGRFTISRDKSKNTVYLQMNSLRAEDTAVYYCAKQRDYGALYAMDYWGQGTLVTVSS

SEQ ID NO: 3452 - protein, 107 aa, Artificial Sequence
  Synthetic
DIQLTQSPSFLSASVGDRVTITCRASDDIYSYLAWYQQKPGKAPKLLIYNSKTLAEGVPSRFSGSGSGTQFTLTISSLQPEDFATYYCQNHVYFPQTFGCGTKVDIK

SEQ ID NO: 3453 - protein, 243 aa, Artificial Sequence
  Synthetic
EVQLLESGGGLVQPGGSLRLSCAASGFTFSSSWMNWVRQAPGKCLEWVGRIYMGDAETKYNDKVKGRFTISRDKSKNTVYLQMNSLRAEDTAVYYCAKQRDYGALYAMDYWGQGTLVTVSSGGGGSGGGGSGGGGSDIQLTQSPSFLSASVGDRVTITCRASDDIYSYLAWYQQKPGKAPKLLIYNSKTLAEGVPSRFSGSGSGTQFTLTISSLQPEDFATYYCQNHVYFPQTFGCGTKVDIK

SEQ ID NO: 3454 - protein, 498 aa, Artificial Sequence
  Synthetic
EVQLLESGGGLVQPGGSLRLSCAASGFTFSSSWMNWVRQAPGKCLEWVGRIYMGDAETKYNDKVKGRFTISRDKSKNTVYLQMNSLRAEDTAVYYCAKQRDYGALYAMDYWGQGTLVTVSSGGGGSGGGGSGGGGSDIQLTQSPSFLSASVGDRVTITCRASDDIYSYLAWYQQKPGKAPKLLIYNSKTLAEGVPSRFSGSGSGTQFTLTISSLQPEDFATYYCQNHVYFPQTFGCGTKVDIKSGGGGSEVQLVESGGGLVQPGGSLKLSCAASGFTFNKYAMNWVRQAPGKGLEWVARIRSKYNNYATYYADSVKDRFTISRDDSKNTAYLQMNNLKTEDTAVYYCVRHGNFGNSYISYWAYWGQGTLVTVSSGGGGSGGGGSGGGGSQTVVTQEPSLTVSPGGTVTLTCGSSTGAVTSGNYPNWVQQKPGQAPRGLIGGTKFLAPGTPARFSGSLLGGKAALTLSGVQPEDEAEYYCVLWYSNRWVFGGGTKLTVL

SEQ ID NO: 3455 - protein, 986 aa, Artificial Sequence
  Synthetic
EVQLLESGGGLVQPGGSLRLSCAASGFTFSSSWMNWVRQAPGKCLEWVGRIYMGDAETKYNDKVKGRFTISRDKSKNTVYLQMNSLRAEDTAVYYCAKQRDYGALYAMDYWGQGTLVTVSSGGGGSGGGGSGGGGSDIQLTQSPSFLSASVGDRVTITCRASDDIYSYLAWYQQKPGKAPKLLIYNSKTLAEGVPSRFSGSGSGTQFTLTISSLQPEDFATYYCQNHVYFPQTFGCGTKVDIKSGGGGSEVQLVESGGGLVQPGGSLKLSCAASGFTFNKYAMNWVRQAPGKGLEWVARIRSKYNNYATYYADSVKDRFTISRDDSKNTAYLQMNNLKTEDTAVYYCVRHGNFGNSYISYWAYWGQGTLVTVSSGGGGSGGGGSGGGGSQTVVTQEPSLTVSPGGTVTLTCGSSTGAVTSGNYPNWVQQKPGQAPRGLIGGTKFLAPGTPARFSGSLLGGKAALTLSGVQPEDEAEYYCVLWYSNRWVFGGGTKLTVLGGGGDKTHTCPPCPAPELLGGPSVFLFPPKPKDTLMISRTPEVTCVVVDVSHEDPEVKFNWYVDGVEVHNAKTKPCEEQYGSTYRCVSVLTVLHQDWLNGKEYKCKVSNKALPAPIEKTISKAKGQPREPQVYTLPPSREEMTKNQVSLTCLVKGFYPSDIAVEWESNGQPENNYKTTPPVLDSDGSFFLYSKLTVDKSRWQQGNVFSCSVMHEALHNHYTQKSLSLSPGKGGGGSGGGGSGGGGSGGGGSGGGGSGGGGSDKTHTCPPCPAPELLGGPSVFLFPPKPKDTLMISRTPEVTCVVVDVSHEDPEVKFNWYVDGVEVHNAKTKPCEEQYGSTYRCVSVLTVLHQDWLNGKEYKCKVSNKALPAPIEKTISKAKGQPREPQVYTLPPSREEMTKNQVSLTCLVKGFYPSDIAVEWESNGQPENNYKTTPPVLDSDGSFFLYSKLTVDKSRWQQGNVFSCSVMHEALHNHYTQKSLSLSPGK

SEQ ID NO: 3456 - protein, 5 aa, Artificial Sequence
  Synthetic
SYWMH

SEQ ID NO: 3457 - protein, 17 aa, Artificial Sequence
  Synthetic
VIYTSGSYTIYNQKFQG

SEQ ID NO: 3458 - protein, 8 aa, Artificial Sequence
  Synthetic
SGPGYFDV

SEQ ID NO: 3459 - protein, 11 aa, Artificial Sequence
  Synthetic
RASGNIHNYLA

SEQ ID NO: 3460 - protein, 7 aa, Artificial Sequence
  Synthetic
NAKTLAE

SEQ ID NO: 3461 - protein, 9 aa, Artificial Sequence
  Synthetic
QHFAWTPYT

SEQ ID NO: 3462 - protein, 117 aa, Artificial Sequence
  Synthetic
QVQLVQSGAEVKKPGASVKVSCKASGYTFTSYWMHWVRQAPGQCLEWMGVIYTSGSYTIYNQKFQGRVTMTRDTSTSTAYMELSSLRSEDTAVYYCARSGPGYFDVWGQGTMVTVSS

SEQ ID NO: 3463 - protein, 107 aa, Artificial Sequence
  Synthetic
DIQLTQSPSFLSASVGDRVTITCRASGNIHNYLAWYQQKPGKAPKLLIYNAKTLAEGVPSRFSGSGSGTEFTLKISSLQPEDFATYYCQHFAWTPYTFGCGTKLEIK

SEQ ID NO: 3464 - protein, 239 aa, Artificial Sequence
  Synthetic
QVQLVQSGAEVKKPGASVKVSCKASGYTFTSYWMHWVRQAPGQCLEWMGVIYTSGSYTIYNQKFQGRVTMTRDTSTSTAYMELSSLRSEDTAVYYCARSGPGYFDVWGQGTMVTVSSGGGGSGGGGSGGGGSDIQLTQSPSFLSASVGDRVTITCRASGNIHNYLAWYQQKPGKAPKLLIYNAKTLAEGVPSRFSGSGSGTEFTLKISSLQPEDFATYYCQHFAWTPYTFGCGTKLEIK

SEQ ID NO: 3465 - protein, 494 aa, Artificial Sequence
  Synthetic
QVQLVQSGAEVKKPGASVKVSCKASGYTFTSYWMHWVRQAPGQCLEWMGVIYTSGSYTIYNQKFQGRVTMTRDTSTSTAYMELSSLRSEDTAVYYCARSGPGYFDVWGQGTMVTVSSGGGGSGGGGSGGGGSDIQLTQSPSFLSASVGDRVTITCRASGNIHNYLAWYQQKPGKAPKLLIYNAKTLAEGVPSRFSGSGSGTEFTLKISSLQPEDFATYYCQHFAWTPYTFGCGTKLEIKSGGGGSEVQLVESGGGLVQPGGSLKLSCAASGFTFNKYAMNWVRQAPGKGLEWVARIRSKYNNYATYYADSVKDRFTISRDDSKNTAYLQMNNLKTEDTAVYYCVRHGNFGNSYISYWAYWGQGTLVTVSSGGGGSGGGGSGGGGSQTVVTQEPSLTVSPGGTVTLTCGSSTGAVTSGNYPNWVQQKPGQAPRGLIGGTKFLAPGTPARFSGSLLGGKAALTLSGVQPEDEAEYYCVLWYSNRWVFGGGTKLTVL

SEQ ID NO: 3466 - protein, 982 aa, Artificial Sequence
  Synthetic
QVQLVQSGAEVKKPGASVKVSCKASGYTFTSYWMHWVRQAPGQCLEWMGVIYTSGSYTIYNQKFQGRVTMTRDTSTSTAYMELSSLRSEDTAVYYCARSGPGYFDVWGQGTMVTVSSGGGGSGGGGSGGGGSDIQLTQSPSFLSASVGDRVTITCRASGNIHNYLAWYQQKPGKAPKLLIYNAKTLAEGVPSRFSGSGSGTEFTLKISSLQPEDFATYYCQHFAWTPYTFGCGTKLEIKSGGGGSEVQLVESGGGLVQPGGSLKLSCAASGFTFNKYAMNWVRQAPGKGLEWVARIRSKYNNYATYYADSVKDRFTISRDDSKNTAYLQMNNLKTEDTAVYYCVRHGNFGNSYISYWAYWGQGTLVTVSSGGGGSGGGGSGGGGSQTVVTQEPSLTVSPGGTVTLTCGSSTGAVTSGNYPNWVQQKPGQAPRGLIGGTKFLAPGTPARFSGSLLGGKAALTLSGVQPEDEAEYYCVLWYSNRWVFGGGTKLTVLGGGGDKTHTCPPCPAPELLGGPSVFLFPPKPKDTLMISRTPEVTCVVVDVSHEDPEVKFNWYVDGVEVHNAKTKPCEEQYGSTYRCVSVLTVLHQDWLNGKEYKCKVSNKALPAPIEKTISKAKGQPREPQVYTLPPSREEMTKNQVSLTCLVKGFYPSDIAVEWESNGQPENNYKTTPPVLDSDGSFFLYSKLTVDKSRWQQGNVFSCSVMHEALHNHYTQKSLSLSPGKGGGGSGGGGSGGGGSGGGGSGGGGSGGGGSDKTHTCPPCPAPELLGGPSVFLFPPKPKDTLMISRTPEVTCVVVDVSHEDPEVKFNWYVDGVEVHNAKTKPCEEQYGSTYRCVSVLTVLHQDWLNGKEYKCKVSNKALPAPIEKTISKAKGQPREPQVYTLPPSREEMTKNQVSLTCLVKGFYPSDIAVEWESNGQPENNYKTTPPVLDSDGSFFLYSKLTVDKSRWQQGNVFSCSVMHEALHNHYTQKSLSLSPGK

SEQ ID NO: 3467 - protein, 5 aa, Artificial Sequence
  Synthetic
SYWMY

SEQ ID NO: 3468 - protein, 17 aa, Artificial Sequence
  Synthetic
KIDPSDDYTNYNQKVKG

SEQ ID NO: 3469 - protein, 8 aa, Artificial Sequence
  Synthetic
WDYTHFDV

SEQ ID NO: 3470 - protein, 10 aa, Artificial Sequence
  Synthetic
RASSSVSYMH

SEQ ID NO: 3471 - protein, 7 aa, Artificial Sequence
  Synthetic
GTSNLAS

SEQ ID NO: 3472 - protein, 9 aa, Artificial Sequence
  Synthetic
QQWSSYPLT

SEQ ID NO: 3473 - protein, 117 aa, Artificial Sequence
  Synthetic
EVQLLESGGGLVQPGGSVRLSCAASGFTFSSYWMYWVRQAPGKCLEWVSKIDPSDDYTNYNQKVKGRFTISIDNSKNTLYLQMNSLRAEDSAVYYCARWDYTHFDVWGQGTTVTVSS

SEQ ID NO: 3474 - protein, 106 aa, Artificial Sequence
  Synthetic
EIVMTQSPATLSVSPGERATLSCRASSSVSYMHWYQQKPGQAPRLLIYGTSNLASGVPVRFSGSGSGTEFTLTISRLQSEDVAVYYCQQWSSYPLTFGCGTKVEIK

SEQ ID NO: 3475 - protein, 238 aa, Artificial Sequence
  Synthetic
EVQLLESGGGLVQPGGSVRLSCAASGFTFSSYWMYWVRQAPGKCLEWVSKIDPSDDYTNYNQKVKGRFTISIDNSKNTLYLQMNSLRAEDSAVYYCARWDYTHFDVWGQGTTVTVSSGGGGSGGGGSGGGGSEIVMTQSPATLSVSPGERATLSCRASSSVSYMHWYQQKPGQAPRLLIYGTSNLASGVPVRFSGSGSGTEFTLTISRLQSEDVAVYYCQQWSSYPLTFGCGTKVEIK

SEQ ID NO: 3476 - protein, 493 aa, Artificial Sequence
  Synthetic
EVQLLESGGGLVQPGGSVRLSCAASGFTFSSYWMYWVRQAPGKCLEWVSKIDPSDDYTNYNQKVKGRFTISIDNSKNTLYLQMNSLRAEDSAVYYCARWDYTHFDVWGQGTTVTVSSGGGGSGGGGSGGGGSEIVMTQSPATLSVSPGERATLSCRASSSVSYMHWYQQKPGQAPRLLIYGTSNLASGVPVRFSGSGSGTEFTLTISRLQSEDVAVYYCQQWSSYPLTFGCGTKVEIKSGGGGSEVQLVESGGGLVQPGGSLKLSCAASGFTFNKYAMNWVRQAPGKGLEWVARIRSKYNNYATYYADSVKDRFTISRDDSKNTAYLQMNNLKTEDTAVYYCVRHGNFGNSYISYWAYWGQGTLVTVSSGGGGSGGGGSGGGGSQTVVTQEPSLTVSPGGTVTLTCGSSTGAVTSGNYPNWVQQKPGQAPRGLIGGTKFLAPGTPARFSGSLLGGKAALTLSGVQPEDEAEYYCVLWYSNRWVFGGGTKLTVL

SEQ ID NO: 3477 - protein, 981 aa, Artificial Sequence
  Synthetic
EVQLLESGGGLVQPGGSVRLSCAASGFTFSSYWMYWVRQAPGKCLEWVSKIDPSDDYTNYNQKVKGRFTISIDNSKNTLYLQMNSLRAEDSAVYYCARWDYTHFDVWGQGTTVTVSSGGGGSGGGGSGGGGSEIVMTQSPATLSVSPGERATLSCRASSSVSYMHWYQQKPGQAPRLLIYGTSNLASGVPVRFSGSGSGTEFTLTISRLQSEDVAVYYCQQWSSYPLTFGCGTKVEIKSGGGGSEVQLVESGGGLVQPGGSLKLSCAASGFTFNKYAMNWVRQAPGKGLEWVARIRSKYNNYATYYADSVKDRFTISRDDSKNTAYLQMNNLKTEDTAVYYCVRHGNFGNSYISYWAYWGQGTLVTVSSGGGGSGGGGSGGGGSQTVVTQEPSLTVSPGGTVTLTCGSSTGAVTSGNYPNWVQQKPGQAPRGLIGGTKFLAPGTPARFSGSLLGGKAALTLSGVQPEDEAEYYCVLWYSNRWVFGGGTKLTVLGGGGDKTHTCPPCPAPELLGGPSVFLFPPKPKDTLMISRTPEVTCVVVDVSHEDPEVKFNWYVDGVEVHNAKTKPCEEQYGSTYRCVSVLTVLHQDWLNGKEYKCKVSNKALPAPIEKTISKAKGQPREPQVYTLPPSREEMTKNQVSLTCLVKGFYPSDIAVEWESNGQPENNYKTTPPVLDSDGSFFLYSKLTVDKSRWQQGNVFSCSVMHEALHNHYTQKSLSLSPGKGGGGSGGGGSGGGGSGGGGSGGGGSGGGGSDKTHTCPPCPAPELLGGPSVFLFPPKPKDTLMISRTPEVTCVVVDVSHEDPEVKFNWYVDGVEVHNAKTKPCEEQYGSTYRCVSVLTVLHQDWLNGKEYKCKVSNKALPAPIEKTISKAKGQPREPQVYTLPPSREEMTKNQVSLTCLVKGFYPSDIAVEWESNGQPENNYKTTPPVLDSDGSFFLYSKLTVDKSRWQQGNVFSCSVMHEALHNHYTQKSLSLSPGK

SEQ ID NO: 3478 - protein, 5 aa, Artificial Sequence
  Synthetic
GYYIH

SEQ ID NO: 3479 - protein, 17 aa, Artificial Sequence
  Synthetic
WINPNSGGTNYAQKFQG

SEQ ID NO: 3480 - protein, 17 aa, Artificial Sequence
  Synthetic
VEAVAGREYYYFSGMDV

SEQ ID NO: 3481 - protein, 11 aa, Artificial Sequence
  Synthetic
SGEKLGDKYVY

SEQ ID NO: 3482 - protein, 7 aa, Artificial Sequence
  Synthetic
QSTKRPS

SEQ ID NO: 3483 - protein, 9 aa, Artificial Sequence
  Synthetic
QAYHASTAV

SEQ ID NO: 3484 - protein, 126 aa, Artificial Sequence
  Synthetic
QVQLVQSGAEVKKPGASVKVSCKASGYTFTGYYIHWVRQAPGQCLEWMGWINPNSGGTNYAQKFQGRVTMTRDTSISTAYMELSRLRSDDTAVYYCARVEAVAGREYYYFSGMDVWGQGTTVTVSS

SEQ ID NO: 3485 - protein, 106 aa, Artificial Sequence
  Synthetic
SYELTQPPSVSVSPGQTASITCSGEKLGDKYVYWYQQKPGQSPVLVIYQSTKRPSGVPERFSGSNSGNTATLTISGTQAMDEADYYCQAYHASTAVFGCGTKLTVL

SEQ ID NO: 3486 - protein, 247 aa, Artificial Sequence
  Synthetic
QVQLVQSGAEVKKPGASVKVSCKASGYTFTGYYIHWVRQAPGQCLEWMGWINPNSGGTNYAQKFQGRVTMTRDTSISTAYMELSRLRSDDTAVYYCARVEAVAGREYYYFSGMDVWGQGTTVTVSSGGGGSGGGGSGGGGSSYELTQPPSVSVSPGQTASITCSGEKLGDKYVYWYQQKPGQSPVLVIYQSTKRPSGVPERFSGSNSGNTATLTISGTQAMDEADYYCQAYHASTAVFGCGTKLTVL

SEQ ID NO: 3487 - protein, 502 aa, Artificial Sequence
  Synthetic
QVQLVQSGAEVKKPGASVKVSCKASGYTFTGYYIHWVRQAPGQCLEWMGWINPNSGGTNYAQKFQGRVTMTRDTSISTAYMELSRLRSDDTAVYYCARVEAVAGREYYYFSGMDVWGQGTTVTVSSGGGGSGGGGSGGGGSSYELTQPPSVSVSPGQTASITCSGEKLGDKYVYWYQQKPGQSPVLVIYQSTKRPSGVPERFSGSNSGNTATLTISGTQAMDEADYYCQAYHASTAVFGCGTKLTVLSGGGGSEVQLVESGGGLVQPGGSLKLSCAASGFTFNKYAMNWVRQAPGKGLEWVARIRSKYNNYATYYADSVKDRFTISRDDSKNTAYLQMNNLKTEDTAVYYCVRHGNFGNSYISYWAYWGQGTLVTVSSGGGGSGGGGSGGGGSQTVVTQEPSLTVSPGGTVTLTCGSSTGAVTSGNYPNWVQQKPGQAPRGLIGGTKFLAPGTPARFSGSLLGGKAALTLSGVQPEDEAEYYCVLWYSNRWVFGGGTKLTVL

SEQ ID NO: 3488 - protein, 990 aa, Artificial Sequence
  Synthetic
QVQLVQSGAEVKKPGASVKVSCKASGYTFTGYYIHWVRQAPGQCLEWMGWINPNSGGTNYAQKFQGRVTMTRDTSISTAYMELSRLRSDDTAVYYCARVEAVAGREYYYFSGMDVWGQGTTVTVSSGGGGSGGGGSGGGGSSYELTQPPSVSVSPGQTASITCSGEKLGDKYVYWYQQKPGQSPVLVIYQSTKRPSGVPERFSGSNSGNTATLTISGTQAMDEADYYCQAYHASTAVFGCGTKLTVLSGGGGSEVQLVESGGGLVQPGGSLKLSCAASGFTFNKYAMNWVRQAPGKGLEWVARIRSKYNNYATYYADSVKDRFTISRDDSKNTAYLQMNNLKTEDTAVYYCVRHGNFGNSYISYWAYWGQGTLVTVSSGGGGSGGGGSGGGGSQTVVTQEPSLTVSPGGTVTLTCGSSTGAVTSGNYPNWVQQKPGQAPRGLIGGTKFLAPGTPARFSGSLLGGKAALTLSGVQPEDEAEYYCVLWYSNRWVFGGGTKLTVLGGGGDKTHTCPPCPAPELLGGPSVFLFPPKPKDTLMISRTPEVTCVVVDVSHEDPEVKFNWYVDGVEVHNAKTKPCEEQYGSTYRCVSVLTVLHQDWLNGKEYKCKVSNKALPAPIEKTISKAKGQPREPQVYTLPPSREEMTKNQVSLTCLVKGFYPSDIAVEWESNGQPENNYKTTPPVLDSDGSFFLYSKLTVDKSRWQQGNVFSCSVMHEALHNHYTQKSLSLSPGKGGGGSGGGGSGGGGSGGGGSGGGGSGGGGSDKTHTCPPCPAPELLGGPSVFLFPPKPKDTLMISRTPEVTCVVVDVSHEDPEVKFNWYVDGVEVHNAKTKPCEEQYGSTYRCVSVLTVLHQDWLNGKEYKCKVSNKALPAPIEKTISKAKGQPREPQVYTLPPSREEMTKNQVSLTCLVKGFYPSDIAVEWESNGQPENNYKTTPPVLDSDGSFFLYSKLTVDKSRWQQGNVFSCSVMHEALHNHYTQKSLSLSPGK

SEQ ID NO: 3489 - protein, 5 aa, Artificial Sequence
  Synthetic
DYYMT

SEQ ID NO: 3490 - protein, 17 aa, Artificial Sequence
  Synthetic
YISSSGSTIYYAEAVKG

SEQ ID NO: 3491 - protein, 8 aa, Artificial Sequence
  Synthetic
DRNSHFDY

SEQ ID NO: 3492 - protein, 11 aa, Artificial Sequence
  Synthetic
RASQGIRTWLA

SEQ ID NO: 3493 - protein, 7 aa, Artificial Sequence
  Synthetic
GASGLQS

SEQ ID NO: 3494 - protein, 9 aa, Artificial Sequence
  Synthetic
QQAESFPRT

SEQ ID NO: 3495 - protein, 117 aa, Artificial Sequence
  Synthetic
QVQLVESGGGLVKPGGSLRLSCAASGFTFSDYYMTWIRQAPGKCLEWLSYISSSGSTIYYAEAVKGRFTISRDNAKNSLFLQMNSLRAEDTAVYYCARDRNSHFDYWGQGTLVTVSS

SEQ ID NO: 3496 - protein, 107 aa, Artificial Sequence
  Synthetic
DIQMTQSPSSVSASVGDRVTITCRASQGIRTWLAWYQQKPGKAPKLLIYGASGLQSGVPSRFSGSGSGTDFTLTISSLQPEDFATYYCQQAESFPRTFGCGTKVEIK

SEQ ID NO: 3497 - protein, 239 aa, Artificial Sequence
  Synthetic
QVQLVESGGGLVKPGGSLRLSCAASGFTFSDYYMTWIRQAPGKCLEWLSYISSSGSTIYYAEAVKGRFTISRDNAKNSLFLQMNSLRAEDTAVYYCARDRNSHFDYWGQGTLVTVSSGGGGSGGGGSGGGGSDIQMTQSPSSVSASVGDRVTITCRASQGIRTWLAWYQQKPGKAPKLLIYGASGLQSGVPSRFSGSGSGTDFTLTISSLQPEDFATYYCQQAESFPRTFGCGTKVEIK

SEQ ID NO: 3498 - protein, 494 aa, Artificial Sequence
  Synthetic
QVQLVESGGGLVKPGGSLRLSCAASGFTFSDYYMTWIRQAPGKCLEWLSYISSSGSTIYYAEAVKGRFTISRDNAKNSLFLQMNSLRAEDTAVYYCARDRNSHFDYWGQGTLVTVSSGGGGSGGGGSGGGGSDIQMTQSPSSVSASVGDRVTITCRASQGIRTWLAWYQQKPGKAPKLLIYGASGLQSGVPSRFSGSGSGTDFTLTISSLQPEDFATYYCQQAESFPRTFGCGTKVEIKSGGGGSEVQLVESGGGLVQPGGSLKLSCAASGFTFNKYAMNWVRQAPGKGLEWVARIRSKYNNYATYYADSVKDRFTISRDDSKNTAYLQMNNLKTEDTAVYYCVRHGNFGNSYISYWAYWGQGTLVTVSSGGGGSGGGGSGGGGSQTVVTQEPSLTVSPGGTVTLTCGSSTGAVTSGNYPNWVQQKPGQAPRGLIGGTKFLAPGTPARFSGSLLGGKAALTLSGVQPEDEAEYYCVLWYSNRWVFGGGTKLTVL

SEQ ID NO: 3499 - protein, 982 aa, Artificial Sequence
  Synthetic
QVQLVESGGGLVKPGGSLRLSCAASGFTFSDYYMTWIRQAPGKCLEWLSYISSSGSTIYYAEAVKGRFTISRDNAKNSLFLQMNSLRAEDTAVYYCARDRNSHFDYWGQGTLVTVSSGGGGSGGGGSGGGGSDIQMTQSPSSVSASVGDRVTITCRASQGIRTWLAWYQQKPGKAPKLLIYGASGLQSGVPSRFSGSGSGTDFTLTISSLQPEDFATYYCQQAESFPRTFGCGTKVEIKSGGGGSEVQLVESGGGLVQPGGSLKLSCAASGFTFNKYAMNWVRQAPGKGLEWVARIRSKYNNYATYYADSVKDRFTISRDDSKNTAYLQMNNLKTEDTAVYYCVRHGNFGNSYISYWAYWGQGTLVTVSSGGGGSGGGGSGGGGSQTVVTQEPSLTVSPGGTVTLTCGSSTGAVTSGNYPNWVQQKPGQAPRGLIGGTKFLAPGTPARFSGSLLGGKAALTLSGVQPEDEAEYYCVLWYSNRWVFGGGTKLTVLGGGGDKTHTCPPCPAPELLGGPSVFLFPPKPKDTLMISRTPEVTCVVVDVSHEDPEVKFNWYVDGVEVHNAKTKPCEEQYGSTYRCVSVLTVLHQDWLNGKEYKCKVSNKALPAPIEKTISKAKGQPREPQVYTLPPSREEMTKNQVSLTCLVKGFYPSDIAVEWESNGQPENNYKTTPPVLDSDGSFFLYSKLTVDKSRWQQGNVFSCSVMHEALHNHYTQKSLSLSPGKGGGGSGGGGSGGGGSGGGGSGGGGSGGGGSDKTHTCPPCPAPELLGGPSVFLFPPKPKDTLMISRTPEVTCVVVDVSHEDPEVKFNWYVDGVEVHNAKTKPCEEQYGSTYRCVSVLTVLHQDWLNGKEYKCKVSNKALPAPIEKTISKAKGQPREPQVYTLPPSREEMTKNQVSLTCLVKGFYPSDIAVEWESNGQPENNYKTTPPVLDSDGSFFLYSKLTVDKSRWQQGNVFSCSVMHEALHNHYTQKSLSLSPGK

SEQ ID NO: 3500 - protein, 7 aa, Artificial Sequence
  Synthetic
SSSYFWG

SEQ ID NO: 3501 - protein, 16 aa, Artificial Sequence
  Synthetic
NIYYSGSSNYNPSLKS

SEQ ID NO: 3502 - protein, 11 aa, Artificial Sequence
  Synthetic
LPRGDRDAFDI

SEQ ID NO: 3503 - protein, 11 aa, Artificial Sequence
  Synthetic
RASQGISNYLA

SEQ ID NO: 3504 - protein, 7 aa, Artificial Sequence
  Synthetic
AASTLQS

SEQ ID NO: 3505 - protein, 9 aa, Artificial Sequence
  Synthetic
QQSYSTPFT

SEQ ID NO: 3506 - protein, 121 aa, Artificial Sequence
  Synthetic
QVQLQESGPGLVKPSETLSLTCTVSGGSISSSSYFWGWIRQPPGKCLEWIGNIYYSGSSNYNPSLKSRVTISVDTSKNQFSLKLSSVTAADTAVYYCARLPRGDRDAFDIWGQGTMVTVSS

SEQ ID NO: 3507 - protein, 107 aa, Artificial Sequence
  Synthetic
DIVMTQSPSSLSASVGDRVTITCRASQGISNYLAWYQQKPGKVPKLLIYAASTLQSGVPSRFSGSGSGTDFTLTISSLQPEDFATYYCQQSYSTPFTFGCGTKVEIK

SEQ ID NO: 3508 - protein, 243 aa, Artificial Sequence
  Synthetic
QVQLQESGPGLVKPSETLSLTCTVSGGSISSSSYFWGWIRQPPGKCLEWIGNIYYSGSSNYNPSLKSRVTISVDTSKNQFSLKLSSVTAADTAVYYCARLPRGDRDAFDIWGQGTMVTVSSGGGGSGGGGSGGGGSDIVMTQSPSSLSASVGDRVTITCRASQGISNYLAWYQQKPGKVPKLLIYAASTLQSGVPSRFSGSGSGTDFTLTISSLQPEDFATYYCQQSYSTPFTFGCGTKVEIK

SEQ ID NO: 3509 - protein, 498 aa, Artificial Sequence
  Synthetic
QVQLQESGPGLVKPSETLSLTCTVSGGSISSSSYFWGWIRQPPGKCLEWIGNIYYSGSSNYNPSLKSRVTISVDTSKNQFSLKLSSVTAADTAVYYCARLPRGDRDAFDIWGQGTMVTVSSGGGGSGGGGSGGGGSDIVMTQSPSSLSASVGDRVTITCRASQGISNYLAWYQQKPGKVPKLLIYAASTLQSGVPSRFSGSGSGTDFTLTISSLQPEDFATYYCQQSYSTPFTFGCGTKVEIKSGGGGSEVQLVESGGGLVQPGGSLKLSCAASGFTFNKYAMNWVRQAPGKGLEWVARIRSKYNNYATYYADSVKDRFTISRDDSKNTAYLQMNNLKTEDTAVYYCVRHGNFGNSYISYWAYWGQGTLVTVSSGGGGSGGGGSGGGGSQTVVTQEPSLTVSPGGTVTLTCGSSTGAVTSGNYPNWVQQKPGQAPRGLIGGTKFLAPGTPARFSGSLLGGKAALTLSGVQPEDEAEYYCVLWYSNRWVFGGGTKLTVL

SEQ ID NO: 3510 - protein, 986 aa, Artificial Sequence
  Synthetic
QVQLQESGPGLVKPSETLSLTCTVSGGSISSSSYFWGWIRQPPGKCLEWIGNIYYSGSSNYNPSLKSRVTISVDTSKNQFSLKLSSVTAADTAVYYCARLPRGDRDAFDIWGQGTMVTVSSGGGGSGGGGSGGGGSDIVMTQSPSSLSASVGDRVTITCRASQGISNYLAWYQQKPGKVPKLLIYAASTLQSGVPSRFSGSGSGTDFTLTISSLQPEDFATYYCQQSYSTPFTFGCGTKVEIKSGGGGSEVQLVESGGGLVQPGGSLKLSCAASGFTFNKYAMNWVRQAPGKGLEWVARIRSKYNNYATYYADSVKDRFTISRDDSKNTAYLQMNNLKTEDTAVYYCVRHGNFGNSYISYWAYWGQGTLVTVSSGGGGSGGGGSGGGGSQTVVTQEPSLTVSPGGTVTLTCGSSTGAVTSGNYPNWVQQKPGQAPRGLIGGTKFLAPGTPARFSGSLLGGKAALTLSGVQPEDEAEYYCVLWYSNRWVFGGGTKLTVLGGGGDKTHTCPPCPAPELLGGPSVFLFPPKPKDTLMISRTPEVTCVVVDVSHEDPEVKFNWYVDGVEVHNAKTKPCEEQYGSTYRCVSVLTVLHQDWLNGKEYKCKVSNKALPAPIEKTISKAKGQPREPQVYTLPPSREEMTKNQVSLTCLVKGFYPSDIAVEWESNGQPENNYKTTPPVLDSDGSFFLYSKLTVDKSRWQQGNVFSCSVMHEALHNHYTQKSLSLSPGKGGGGSGGGGSGGGGSGGGGSGGGGSGGGGSDKTHTCPPCPAPELLGGPSVFLFPPKPKDTLMISRTPEVTCVVVDVSHEDPEVKFNWYVDGVEVHNAKTKPCEEQYGSTYRCVSVLTVLHQDWLNGKEYKCKVSNKALPAPIEKTISKAKGQPREPQVYTLPPSREEMTKNQVSLTCLVKGFYPSDIAVEWESNGQPENNYKTTPPVLDSDGSFFLYSKLTVDKSRWQQGNVFSCSVMHEALHNHYTQKSLSLSPGK

SEQ ID NO: 3511 - protein, 7 aa, Artificial Sequence
  Synthetic
SSSYFWV

SEQ ID NO: 3512 - protein, 16 aa, Artificial Sequence
  Synthetic
SIYYSGSTYYNPSLKS

SEQ ID NO: 3513 - protein, 11 aa, Artificial Sequence
  Synthetic
LPRGDRMTFDI

SEQ ID NO: 3514 - protein, 12 aa, Artificial Sequence
  Synthetic
RASQSVSSSYLA

SEQ ID NO: 3515 - protein, 7 aa, Artificial Sequence
  Synthetic
GASSRAT

SEQ ID NO: 3516 - protein, 9 aa, Artificial Sequence
  Synthetic
QQYGSSPFT

SEQ ID NO: 3517 - protein, 121 aa, Artificial Sequence
  Synthetic
QVQLQESGPGLVKPSETLSLTCTVSGGSISSSSYFWVWIRQPPGKCLEWIGSIYYSGSTYYNPSLKSRVTISVDTSKNQFSLKLNSVTAADTAVYYCARLPRGDRMTFDIWGQGTMVTVSS

SEQ ID NO: 3518 - protein, 108 aa, Artificial Sequence
  Synthetic
EIVLTQSPGTLSLSPGERATLSCRASQSVSSSYLAWYQQKPGQAPRLLIYGASSRATGIPDRFSGSGSGTDFTLTISRLEPEDFAVYYCQQYGSSPFTFGCGTKLEIK

SEQ ID NO: 3519 - protein, 244 aa, Artificial Sequence
  Synthetic
QVQLQESGPGLVKPSETLSLTCTVSGGSISSSSYFWVWIRQPPGKCLEWIGSIYYSGSTYYNPSLKSRVTISVDTSKNQFSLKLNSVTAADTAVYYCARLPRGDRMTFDIWGQGTMVTVSSGGGGSGGGGSGGGGSEIVLTQSPGTLSLSPGERATLSCRASQSVSSSYLAWYQQKPGQAPRLLIYGASSRATGIPDRFSGSGSGTDFTLTISRLEPEDFAVYYCQQYGSSPFTFGCGTKLEIK

SEQ ID NO: 3520 - protein, 499 aa, Artificial Sequence
  Synthetic
QVQLQESGPGLVKPSETLSLTCTVSGGSISSSSYFWVWIRQPPGKCLEWIGSIYYSGSTYYNPSLKSRVTISVDTSKNQFSLKLNSVTAADTAVYYCARLPRGDRMTFDIWGQGTMVTVSSGGGGSGGGGSGGGGSEIVLTQSPGTLSLSPGERATLSCRASQSVSSSYLAWYQQKPGQAPRLLIYGASSRATGIPDRFSGSGSGTDFTLTISRLEPEDFAVYYCQQYGSSPFTFGCGTKLEIKSGGGGSEVQLVESGGGLVQPGGSLKLSCAASGFTFNKYAMNWVRQAPGKGLEWVARIRSKYNNYATYYADSVKDRFTISRDDSKNTAYLQMNNLKTEDTAVYYCVRHGNFGNSYISYWAYWGQGTLVTVSSGGGGSGGGGSGGGGSQTVVTQEPSLTVSPGGTVTLTCGSSTGAVTSGNYPNWVQQKPGQAPRGLIGGTKFLAPGTPARFSGSLLGGKAALTLSGVQPEDEAEYYCVLWYSNRWVFGGGTKLTVL

SEQ ID NO: 3521 - protein, 987 aa, Artificial Sequence
  Synthetic
QVQLQESGPGLVKPSETLSLTCTVSGGSISSSSYFWVWIRQPPGKCLEWIGSIYYSGSTYYNPSLKSRVTISVDTSKNQFSLKLNSVTAADTAVYYCARLPRGDRMTFDIWGQGTMVTVSSGGGGSGGGGSGGGGSEIVLTQSPGTLSLSPGERATLSCRASQSVSSSYLAWYQQKPGQAPRLLIYGASSRATGIPDRFSGSGSGTDFTLTISRLEPEDFAVYYCQQYGSSPFTFGCGTKLEIKSGGGGSEVQLVESGGGLVQPGGSLKLSCAASGFTFNKYAMNWVRQAPGKGLEWVARIRSKYNNYATYYADSVKDRFTISRDDSKNTAYLQMNNLKTEDTAVYYCVRHGNFGNSYISYWAYWGQGTLVTVSSGGGGSGGGGSGGGGSQTVVTQEPSLTVSPGGTVTLTCGSSTGAVTSGNYPNWVQQKPGQAPRGLIGGTKFLAPGTPARFSGSLLGGKAALTLSGVQPEDEAEYYCVLWYSNRWVFGGGTKLTVLGGGGDKTHTCPPCPAPELLGGPSVFLFPPKPKDTLMISRTPEVTCVVVDVSHEDPEVKFNWYVDGVEVHNAKTKPCEEQYGSTYRCVSVLTVLHQDWLNGKEYKCKVSNKALPAPIEKTISKAKGQPREPQVYTLPPSREEMTKNQVSLTCLVKGFYPSDIAVEWESNGQPENNYKTTPPVLDSDGSFFLYSKLTVDKSRWQQGNVFSCSVMHEALHNHYTQKSLSLSPGKGGGGSGGGGSGGGGSGGGGSGGGGSGGGGSDKTHTCPPCPAPELLGGPSVFLFPPKPKDTLMISRTPEVTCVVVDVSHEDPEVKFNWYVDGVEVHNAKTKPCEEQYGSTYRCVSVLTVLHQDWLNGKEYKCKVSNKALPAPIEKTISKAKGQPREPQVYTLPPSREEMTKNQVSLTCLVKGFYPSDIAVEWESNGQPENNYKTTPPVLDSDGSFFLYSKLTVDKSRWQQGNVFSCSVMHEALHNHYTQKSLSLSPGK

SEQ ID NO: 3522 - protein, 5 aa, Artificial Sequence
  Synthetic
SYAMS

SEQ ID NO: 3523 - protein, 17 aa, Artificial Sequence
  Synthetic
AISGSGEQWYYAPSVKG

SEQ ID NO: 3524 - protein, 12 aa, Artificial Sequence
  Synthetic
VRNYYGSGSLDY

SEQ ID NO: 3525 - protein, 12 aa, Artificial Sequence
  Synthetic
RASQSFSSAYLA

SEQ ID NO: 3526 - protein, 7 aa, Artificial Sequence
  Synthetic
GASIRAT

SEQ ID NO: 3527 - protein, 8 aa, Artificial Sequence
  Synthetic
QQYGSSLT

SEQ ID NO: 3528 - protein, 121 aa, Artificial Sequence
  Synthetic
EVQLLESGGGVVQPGRSLRLSCAASGFTFSSYAMSWVRQAPGKCLEWVSAISGSGEQWYYAPSVKGRFTISRDNSKNTLYLQMNSLRAEDTAVYYCAKVRNYYGSGSLDYWGQGTLVTVSS

SEQ ID NO: 3529 - protein, 107 aa, Artificial Sequence
  Synthetic
EIVLTQSPGTLSLSPGERATLSCRASQSFSSAYLAWYQQKPGQAPRLLIYGASIRATGIPDRFSGSGSGTDFTLTISRLEPEDFAVYYCQQYGSSLTFGCGTKVEIK

SEQ ID NO: 3530 - protein, 243 aa, Artificial Sequence
  Synthetic
EVQLLESGGGVVQPGRSLRLSCAASGFTFSSYAMSWVRQAPGKCLEWVSAISGSGEQWYYAPSVKGRFTISRDNSKNTLYLQMNSLRAEDTAVYYCAKVRNYYGSGSLDYWGQGTLVTVSSGGGGSGGGGSGGGGSEIVLTQSPGTLSLSPGERATLSCRASQSFSSAYLAWYQQKPGQAPRLLIYGASIRATGIPDRFSGSGSGTDFTLTISRLEPEDFAVYYCQQYGSSLTFGCGTKVEIK

SEQ ID NO: 3531 - protein, 498 aa, Artificial Sequence
  Synthetic
EVQLLESGGGVVQPGRSLRLSCAASGFTFSSYAMSWVRQAPGKCLEWVSAISGSGEQWYYAPSVKGRFTISRDNSKNTLYLQMNSLRAEDTAVYYCAKVRNYYGSGSLDYWGQGTLVTVSSGGGGSGGGGSGGGGSEIVLTQSPGTLSLSPGERATLSCRASQSFSSAYLAWYQQKPGQAPRLLIYGASIRATGIPDRFSGSGSGTDFTLTISRLEPEDFAVYYCQQYGSSLTFGCGTKVEIKSGGGGSEVQLVESGGGLVQPGGSLKLSCAASGFTFNKYAMNWVRQAPGKGLEWVARIRSKYNNYATYYADSVKDRFTISRDDSKNTAYLQMNNLKTEDTAVYYCVRHGNFGNSYISYWAYWGQGTLVTVSSGGGGSGGGGSGGGGSQTVVTQEPSLTVSPGGTVTLTCGSSTGAVTSGNYPNWVQQKPGQAPRGLIGGTKFLAPGTPARFSGSLLGGKAALTLSGVQPEDEAEYYCVLWYSNRWVFGGGTKLTVL

SEQ ID NO: 3532 - protein, 986 aa, Artificial Sequence
  Synthetic
EVQLLESGGGVVQPGRSLRLSCAASGFTFSSYAMSWVRQAPGKCLEWVSAISGSGEQWYYAPSVKGRFTISRDNSKNTLYLQMNSLRAEDTAVYYCAKVRNYYGSGSLDYWGQGTLVTVSSGGGGSGGGGSGGGGSEIVLTQSPGTLSLSPGERATLSCRASQSFSSAYLAWYQQKPGQAPRLLIYGASIRATGIPDRFSGSGSGTDFTLTISRLEPEDFAVYYCQQYGSSLTFGCGTKVEIKSGGGGSEVQLVESGGGLVQPGGSLKLSCAASGFTFNKYAMNWVRQAPGKGLEWVARIRSKYNNYATYYADSVKDRFTISRDDSKNTAYLQMNNLKTEDTAVYYCVRHGNFGNSYISYWAYWGQGTLVTVSSGGGGSGGGGSGGGGSQTVVTQEPSLTVSPGGTVTLTCGSSTGAVTSGNYPNWVQQKPGQAPRGLIGGTKFLAPGTPARFSGSLLGGKAALTLSGVQPEDEAEYYCVLWYSNRWVFGGGTKLTVLGGGGDKTHTCPPCPAPELLGGPSVFLFPPKPKDTLMISRTPEVTCVVVDVSHEDPEVKFNWYVDGVEVHNAKTKPCEEQYGSTYRCVSVLTVLHQDWLNGKEYKCKVSNKALPAPIEKTISKAKGQPREPQVYTLPPSREEMTKNQVSLTCLVKGFYPSDIAVEWESNGQPENNYKTTPPVLDSDGSFFLYSKLTVDKSRWQQGNVFSCSVMHEALHNHYTQKSLSLSPGKGGGGSGGGGSGGGGSGGGGSGGGGSGGGGSDKTHTCPPCPAPELLGGPSVFLFPPKPKDTLMISRTPEVTCVVVDVSHEDPEVKFNWYVDGVEVHNAKTKPCEEQYGSTYRCVSVLTVLHQDWLNGKEYKCKVSNKALPAPIEKTISKAKGQPREPQVYTLPPSREEMTKNQVSLTCLVKGFYPSDIAVEWESNGQPENNYKTTPPVLDSDGSFFLYSKLTVDKSRWQQGNVFSCSVMHEALHNHYTQKSLSLSPGK

SEQ ID NO: 3533 - protein, 5 aa, Artificial Sequence
  Synthetic
SYAMS

SEQ ID NO: 3534 - protein, 17 aa, Artificial Sequence
  Synthetic
AISGSGEGDYYANSVKG

SEQ ID NO: 3535 - protein, 12 aa, Artificial Sequence
  Synthetic
VRNYYGSGSLDY

SEQ ID NO: 3536 - protein, 12 aa, Artificial Sequence
  Synthetic
RASQSVSSTYLA

SEQ ID NO: 3537 - protein, 7 aa, Artificial Sequence
  Synthetic
GASIRAT

SEQ ID NO: 3538 - protein, 8 aa, Artificial Sequence
  Synthetic
QQYGSSLT

SEQ ID NO: 3539 - protein, 121 aa, Artificial Sequence
  Synthetic
EVQLLESGGGVVQPGRSLRLSCAASGFTFSSYAMSWVRQAPGMCLEWVSAISGSGEGDYYANSVKGRFTISRDNSKNTLYLQMNSLRAEDTAVYYCAKVRNYYGSGSLDYWGQGTLVTVSS

SEQ ID NO: 3540 - protein, 107 aa, Artificial Sequence
  Synthetic
EIVLTQSPGTLSLSPGERATLSCRASQSVSSTYLAWYQQKPGQAPRLLIYGASIRATGIPDRFSGSGSGTDFTLTISRLEPEDFAVYYCQQYGSSLTFGCGTKVEIK

SEQ ID NO: 3541 - protein, 243 aa, Artificial Sequence
  Synthetic
EVQLLESGGGVVQPGRSLRLSCAASGFTFSSYAMSWVRQAPGMCLEWVSAISGSGEGDYYANSVKGRFTISRDNSKNTLYLQMNSLRAEDTAVYYCAKVRNYYGSGSLDYWGQGTLVTVSSGGGGSGGGGSGGGGSEIVLTQSPGTLSLSPGERATLSCRASQSVSSTYLAWYQQKPGQAPRLLIYGASIRATGIPDRFSGSGSGTDFTLTISRLEPEDFAVYYCQQYGSSLTFGCGTKVEIK

SEQ ID NO: 3542 - protein, 498 aa, Artificial Sequence
  Synthetic
EVQLLESGGGVVQPGRSLRLSCAASGFTFSSYAMSWVRQAPGMCLEWVSAISGSGEGDYYANSVKGRFTISRDNSKNTLYLQMNSLRAEDTAVYYCAKVRNYYGSGSLDYWGQGTLVTVSSGGGGSGGGGSGGGGSEIVLTQSPGTLSLSPGERATLSCRASQSVSSTYLAWYQQKPGQAPRLLIYGASIRATGIPDRFSGSGSGTDFTLTISRLEPEDFAVYYCQQYGSSLTFGCGTKVEIKSGGGGSEVQLVESGGGLVQPGGSLKLSCAASGFTFNKYAMNWVRQAPGKGLEWVARIRSKYNNYATYYADSVKDRFTISRDDSKNTAYLQMNNLKTEDTAVYYCVRHGNFGNSYISYWAYWGQGTLVTVSSGGGGSGGGGSGGGGSQTVVTQEPSLTVSPGGTVTLTCGSSTGAVTSGNYPNWVQQKPGQAPRGLIGGTKFLAPGTPARFSGSLLGGKAALTLSGVQPEDEAEYYCVLWYSNRWVFGGGTKLTVL

SEQ ID NO: 3543 - protein, 986 aa, Artificial Sequence
  Synthetic
EVQLLESGGGVVQPGRSLRLSCAASGFTFSSYAMSWVRQAPGMCLEWVSAISGSGEGDYYANSVKGRFTISRDNSKNTLYLQMNSLRAEDTAVYYCAKVRNYYGSGSLDYWGQGTLVTVSSGGGGSGGGGSGGGGSEIVLTQSPGTLSLSPGERATLSCRASQSVSSTYLAWYQQKPGQAPRLLIYGASIRATGIPDRFSGSGSGTDFTLTISRLEPEDFAVYYCQQYGSSLTFGCGTKVEIKSGGGGSEVQLVESGGGLVQPGGSLKLSCAASGFTFNKYAMNWVRQAPGKGLEWVARIRSKYNNYATYYADSVKDRFTISRDDSKNTAYLQMNNLKTEDTAVYYCVRHGNFGNSYISYWAYWGQGTLVTVSSGGGGSGGGGSGGGGSQTVVTQEPSLTVSPGGTVTLTCGSSTGAVTSGNYPNWVQQKPGQAPRGLIGGTKFLAPGTPARFSGSLLGGKAALTLSGVQPEDEAEYYCVLWYSNRWVFGGGTKLTVLGGGGDKTHTCPPCPAPELLGGPSVFLFPPKPKDTLMISRTPEVTCVVVDVSHEDPEVKFNWYVDGVEVHNAKTKPCEEQYGSTYRCVSVLTVLHQDWLNGKEYKCKVSNKALPAPIEKTISKAKGQPREPQVYTLPPSREEMTKNQVSLTCLVKGFYPSDIAVEWESNGQPENNYKTTPPVLDSDGSFFLYSKLTVDKSRWQQGNVFSCSVMHEALHNHYTQKSLSLSPGKGGGGSGGGGSGGGGSGGGGSGGGGSGGGGSDKTHTCPPCPAPELLGGPSVFLFPPKPKDTLMISRTPEVTCVVVDVSHEDPEVKFNWYVDGVEVHNAKTKPCEEQYGSTYRCVSVLTVLHQDWLNGKEYKCKVSNKALPAPIEKTISKAKGQPREPQVYTLPPSREEMTKNQVSLTCLVKGFYPSDIAVEWESNGQPENNYKTTPPVLDSDGSFFLYSKLTVDKSRWQQGNVFSCSVMHEALHNHYTQKSLSLSPGK

SEQ ID NO: 3544 - protein, 5 aa, Artificial Sequence
  Synthetic
SYAMS

SEQ ID NO: 3545 - protein, 17 aa, Artificial Sequence
  Synthetic
AISGSGGSTYYAIDVKG

SEQ ID NO: 3546 - protein, 19 aa, Artificial Sequence
  Synthetic
EGYYPGSGYPLYYYFGMDV

SEQ ID NO: 3547 - protein, 12 aa, Artificial Sequence
  Synthetic
RASQSVSSSYLA

SEQ ID NO: 3548 - protein, 7 aa, Artificial Sequence
  Synthetic
GASSRAT

SEQ ID NO: 3549 - protein, 10 aa, Artificial Sequence
  Synthetic
QQYGSSPIFT

SEQ ID NO: 3550 - protein, 128 aa, Artificial Sequence
  Synthetic
EVQLLESGGGLVQPGGSLRLSCAASGFTFSSYAMSWVRQAPGKCLEWVSAISGSGGSTYYAIDVKGRFTISRDNSKNTLYLQMNSLRAEDTAVYYCAKEGYYPGSGYPLYYYFGMDVWGQGTTVTVSS

SEQ ID NO: 3551 - protein, 109 aa, Artificial Sequence
  Synthetic
EIVLTQSPGTLSLSPGERATLSCRASQSVSSSYLAWYQQKPGQAPRLLIYGASSRATGIPDRFSGSGSGTDFTLTISRLEPEDFAVYYCQQYGSSPIFTFGCGTKVEIK

SEQ ID NO: 3552 - protein, 252 aa, Artificial Sequence
  Synthetic
EVQLLESGGGLVQPGGSLRLSCAASGFTFSSYAMSWVRQAPGKCLEWVSAISGSGGSTYYAIDVKGRFTISRDNSKNTLYLQMNSLRAEDTAVYYCAKEGYYPGSGYPLYYYFGMDVWGQGTTVTVSSGGGGSGGGGSGGGGSEIVLTQSPGTLSLSPGERATLSCRASQSVSSSYLAWYQQKPGQAPRLLIYGASSRATGIPDRFSGSGSGTDFTLTISRLEPEDFAVYYCQQYGSSPIFTFGCGTKVEIK

SEQ ID NO: 3553 - protein, 507 aa, Artificial Sequence
  Synthetic
EVQLLESGGGLVQPGGSLRLSCAASGFTFSSYAMSWVRQAPGKCLEWVSAISGSGGSTYYAIDVKGRFTISRDNSKNTLYLQMNSLRAEDTAVYYCAKEGYYPGSGYPLYYYFGMDVWGQGTTVTVSSGGGGSGGGGSGGGGSEIVLTQSPGTLSLSPGERATLSCRASQSVSSSYLAWYQQKPGQAPRLLIYGASSRATGIPDRFSGSGSGTDFTLTISRLEPEDFAVYYCQQYGSSPIFTFGCGTKVEIKSGGGGSEVQLVESGGGLVQPGGSLKLSCAASGFTFNKYAMNWVRQAPGKGLEWVARIRSKYNNYATYYADSVKDRFTISRDDSKNTAYLQMNNLKTEDTAVYYCVRHGNFGNSYISYWAYWGQGTLVTVSSGGGGSGGGGSGGGGSQTVVTQEPSLTVSPGGTVTLTCGSSTGAVTSGNYPNWVQQKPGQAPRGLIGGTKFLAPGTPARFSGSLLGGKAALTLSGVQPEDEAEYYCVLWYSNRWVFGGGTKLTVL

SEQ ID NO: 3554 - protein, 995 aa, Artificial Sequence
  Synthetic
EVQLLESGGGLVQPGGSLRLSCAASGFTFSSYAMSWVRQAPGKCLEWVSAISGSGGSTYYAIDVKGRFTISRDNSKNTLYLQMNSLRAEDTAVYYCAKEGYYPGSGYPLYYYFGMDVWGQGTTVTVSSGGGGSGGGGSGGGGSEIVLTQSPGTLSLSPGERATLSCRASQSVSSSYLAWYQQKPGQAPRLLIYGASSRATGIPDRFSGSGSGTDFTLTISRLEPEDFAVYYCQQYGSSPIFTFGCGTKVEIKSGGGGSEVQLVESGGGLVQPGGSLKLSCAASGFTFNKYAMNWVRQAPGKGLEWVARIRSKYNNYATYYADSVKDRFTISRDDSKNTAYLQMNNLKTEDTAVYYCVRHGNFGNSYISYWAYWGQGTLVTVSSGGGGSGGGGSGGGGSQTVVTQEPSLTVSPGGTVTLTCGSSTGAVTSGNYPNWVQQKPGQAPRGLIGGTKFLAPGTPARFSGSLLGGKAALTLSGVQPEDEAEYYCVLWYSNRWVFGGGTKLTVLGGGGDKTHTCPPCPAPELLGGPSVFLFPPKPKDTLMISRTPEVTCVVVDVSHEDPEVKFNWYVDGVEVHNAKTKPCEEQYGSTYRCVSVLTVLHQDWLNGKEYKCKVSNKALPAPIEKTISKAKGQPREPQVYTLPPSREEMTKNQVSLTCLVKGFYPSDIAVEWESNGQPENNYKTTPPVLDSDGSFFLYSKLTVDKSRWQQGNVFSCSVMHEALHNHYTQKSLSLSPGKGGGGSGGGGSGGGGSGGGGSGGGGSGGGGSDKTHTCPPCPAPELLGGPSVFLFPPKPKDTLMISRTPEVTCVVVDVSHEDPEVKFNWYVDGVEVHNAKTKPCEEQYGSTYRCVSVLTVLHQDWLNGKEYKCKVSNKALPAPIEKTISKAKGQPREPQVYTLPPSREEMTKNQVSLTCLVKGFYPSDIAVEWESNGQPENNYKTTPPVLDSDGSFFLYSKLTVDKSRWQQGNVFSCSVMHEALHNHYTQKSLSLSPGK

SEQ ID NO: 3555 - protein, 5 aa, Artificial Sequence
  Synthetic
SYAMS

SEQ ID NO: 3556 - protein, 17 aa, Artificial Sequence
  Synthetic
AISGSGEFSYYAAAVKG

SEQ ID NO: 3557 - protein, 12 aa, Artificial Sequence
  Synthetic
VRNYYGSGSLDY

SEQ ID NO: 3558 - protein, 12 aa, Artificial Sequence
  Synthetic
RASQSVSSTYLA

SEQ ID NO: 3559 - protein, 7 aa, Artificial Sequence
  Synthetic
GASIRAT

SEQ ID NO: 3560 - protein, 8 aa, Artificial Sequence
  Synthetic
QQYQSSLT

SEQ ID NO: 3561 - protein, 121 aa, Artificial Sequence
  Synthetic
EVQLLESGGGVVQPGRSLRLSCAASGFTFSSYAMSWVRQAPGKCLEWVSAISGSGEFSYYAAAVKGRFTISRDNSKNTLYLQMNSLRAEDTAVYYCAKVRNYYGSGSLDYWGQGTLVTVSS

SEQ ID NO: 3562 - protein, 107 aa, Artificial Sequence
  Synthetic
EIVLTQSPGTLSLSPGERATLSCRASQSVSSTYLAWYQQKPGQAPRLLIYGASIRATGIPDRFSGSGSGTDFTLTISRLEPEDFAVYYCQQYQSSLTFGCGTKVEIK

SEQ ID NO: 3563 - protein, 243 aa, Artificial Sequence
  Synthetic
EVQLLESGGGVVQPGRSLRLSCAASGFTFSSYAMSWVRQAPGKCLEWVSAISGSGEFSYYAAAVKGRFTISRDNSKNTLYLQMNSLRAEDTAVYYCAKVRNYYGSGSLDYWGQGTLVTVSSGGGGSGGGGSGGGGSEIVLTQSPGTLSLSPGERATLSCRASQSVSSTYLAWYQQKPGQAPRLLIYGASIRATGIPDRFSGSGSGTDFTLTISRLEPEDFAVYYCQQYQSSLTFGCGTKVEIK

SEQ ID NO: 3564 - protein, 498 aa, Artificial Sequence
  Synthetic
EVQLLESGGGVVQPGRSLRLSCAASGFTFSSYAMSWVRQAPGKCLEWVSAISGSGEFSYYAAAVKGRFTISRDNSKNTLYLQMNSLRAEDTAVYYCAKVRNYYGSGSLDYWGQGTLVTVSSGGGGSGGGGSGGGGSEIVLTQSPGTLSLSPGERATLSCRASQSVSSTYLAWYQQKPGQAPRLLIYGASIRATGIPDRFSGSGSGTDFTLTISRLEPEDFAVYYCQQYQSSLTFGCGTKVEIKSGGGGSEVQLVESGGGLVQPGGSLKLSCAASGFTFNKYAMNWVRQAPGKGLEWVARIRSKYNNYATYYADSVKDRFTISRDDSKNTAYLQMNNLKTEDTAVYYCVRHGNFGNSYISYWAYWGQGTLVTVSSGGGGSGGGGSGGGGSQTVVTQEPSLTVSPGGTVTLTCGSSTGAVTSGNYPNWVQQKPGQAPRGLIGGTKFLAPGTPARFSGSLLGGKAALTLSGVQPEDEAEYYCVLWYSNRWVFGGGTKLTVL

SEQ ID NO: 3565 - protein, 986 aa, Artificial Sequence
  Synthetic
EVQLLESGGGVVQPGRSLRLSCAASGFTFSSYAMSWVRQAPGKCLEWVSAISGSGEFSYYAAAVKGRFTISRDNSKNTLYLQMNSLRAEDTAVYYCAKVRNYYGSGSLDYWGQGTLVTVSSGGGGSGGGGSGGGGSEIVLTQSPGTLSLSPGERATLSCRASQSVSSTYLAWYQQKPGQAPRLLIYGASIRATGIPDRFSGSGSGTDFTLTISRLEPEDFAVYYCQQYQSSLTFGCGTKVEIKSGGGGSEVQLVESGGGLVQPGGSLKLSCAASGFTFNKYAMNWVRQAPGKGLEWVARIRSKYNNYATYYADSVKDRFTISRDDSKNTAYLQMNNLKTEDTAVYYCVRHGNFGNSYISYWAYWGQGTLVTVSSGGGGSGGGGSGGGGSQTVVTQEPSLTVSPGGTVTLTCGSSTGAVTSGNYPNWVQQKPGQAPRGLIGGTKFLAPGTPARFSGSLLGGKAALTLSGVQPEDEAEYYCVLWYSNRWVFGGGTKLTVLGGGGDKTHTCPPCPAPELLGGPSVFLFPPKPKDTLMISRTPEVTCVVVDVSHEDPEVKFNWYVDGVEVHNAKTKPCEEQYGSTYRCVSVLTVLHQDWLNGKEYKCKVSNKALPAPIEKTISKAKGQPREPQVYTLPPSREEMTKNQVSLTCLVKGFYPSDIAVEWESNGQPENNYKTTPPVLDSDGSFFLYSKLTVDKSRWQQGNVFSCSVMHEALHNHYTQKSLSLSPGKGGGGSGGGGSGGGGSGGGGSGGGGSGGGGSDKTHTCPPCPAPELLGGPSVFLFPPKPKDTLMISRTPEVTCVVVDVSHEDPEVKFNWYVDGVEVHNAKTKPCEEQYGSTYRCVSVLTVLHQDWLNGKEYKCKVSNKALPAPIEKTISKAKGQPREPQVYTLPPSREEMTKNQVSLTCLVKGFYPSDIAVEWESNGQPENNYKTTPPVLDSDGSFFLYSKLTVDKSRWQQGNVFSCSVMHEALHNHYTQKSLSLSPGK

SEQ ID NO: 3566 - protein, 5 aa, Artificial Sequence
  Synthetic
SYGMG

SEQ ID NO: 3567 - protein, 17 aa, Artificial Sequence
  Synthetic
VISYHGSNKYYADAVKG

SEQ ID NO: 3568 - protein, 21 aa, Artificial Sequence
  Synthetic
EGAHFGSGSYYPLYYYYAMDV

SEQ ID NO: 3569 - protein, 12 aa, Artificial Sequence
  Synthetic
RASQSVSSSYLA

SEQ ID NO: 3570 - protein, 7 aa, Artificial Sequence
  Synthetic
GASIRAT

SEQ ID NO: 3571 - protein, 10 aa, Artificial Sequence
  Synthetic
QQTGSSPIFT

SEQ ID NO: 3572 - protein, 130 aa, Artificial Sequence
  Synthetic
QVQLVESGGGVVQPGRSLRLSCAASGFTFSSYGMGWVRQAPGKCLEWVAVISYHGSNKYYADAVKGRFTISRDNSKNTLYLQMNSLRAEDTAVYYCAREGAHFGSGSYYPLYYYYAMDVWGQGTTVTVSS

SEQ ID NO: 3573 - protein, 108 aa, Artificial Sequence
  Synthetic
EIVTQSPGTLSLSPGERATLSCRASQSVSSSYLAWYQQKPGQAPRLLIYGASIRATGIPDRFSGSGSGTDFTLTISRLEPEDFAVYYCQQTGSSPIFTFGCGTKVEIK

SEQ ID NO: 3574 - protein, 253 aa, Artificial Sequence
  Synthetic
QVQLVESGGGVVQPGRSLRLSCAASGFTFSSYGMGWVRQAPGKCLEWVAVISYHGSNKYYADAVKGRFTISRDNSKNTLYLQMNSLRAEDTAVYYCAREGAHFGSGSYYPLYYYYAMDVWGQGTTVTVSSGGGGSGGGGSGGGGSEIVTQSPGTLSLSPGERATLSCRASQSVSSSYLAWYQQKPGQAPRLLIYGASIRATGIPDRFSGSGSGTDFTLTISRLEPEDFAVYYCQQTGSSPIFTFGCGTKVEIK

SEQ ID NO: 3575 - protein, 508 aa, Artificial Sequence
  Synthetic
QVQLVESGGGVVQPGRSLRLSCAASGFTFSSYGMGWVRQAPGKCLEWVAVISYHGSNKYYADAVKGRFTISRDNSKNTLYLQMNSLRAEDTAVYYCAREGAHFGSGSYYPLYYYYAMDVWGQGTTVTVSSGGGGSGGGGSGGGGSEIVTQSPGTLSLSPGERATLSCRASQSVSSSYLAWYQQKPGQAPRLLIYGASIRATGIPDRFSGSGSGTDFTLTISRLEPEDFAVYYCQQTGSSPIFTFGCGTKVEIKSGGGGSEVQLVESGGGLVQPGGSLKLSCAASGFTFNKYAMNWVRQAPGKGLEWVARIRSKYNNYATYYADSVKDRFTISRDDSKNTAYLQMNNLKTEDTAVYYCVRHGNFGNSYISYWAYWGQGTLVTVSSGGGGSGGGGSGGGGSQTVVTQEPSLTVSPGGTVTLTCGSSTGAVTSGNYPNWVQQKPGQAPRGLIGGTKFLAPGTPARFSGSLLGGKAALTLSGVQPEDEAEYYCVLWYSNRWVFGGGTKLTVL

SEQ ID NO: 3576 - protein, 996 aa, Artificial Sequence
  Synthetic
QVQLVESGGGVVQPGRSLRLSCAASGFTFSSYGMGWVRQAPGKCLEWVAVISYHGSNKYYADAVKGRFTISRDNSKNTLYLQMNSLRAEDTAVYYCAREGAHFGSGSYYPLYYYYAMDVWGQGTTVTVSSGGGGSGGGGSGGGGSEIVTQSPGTLSLSPGERATLSCRASQSVSSSYLAWYQQKPGQAPRLLIYGASIRATGIPDRFSGSGSGTDFTLTISRLEPEDFAVYYCQQTGSSPIFTFGCGTKVEIKSGGGGSEVQLVESGGGLVQPGGSLKLSCAASGFTFNKYAMNWVRQAPGKGLEWVARIRSKYNNYATYYADSVKDRFTISRDDSKNTAYLQMNNLKTEDTAVYYCVRHGNFGNSYISYWAYWGQGTLVTVSSGGGGSGGGGSGGGGSQTVVTQEPSLTVSPGGTVTLTCGSSTGAVTSGNYPNWVQQKPGQAPRGLIGGTKFLAPGTPARFSGSLLGGKAALTLSGVQPEDEAEYYCVLWYSNRWVFGGGTKLTVLGGGGDKTHTCPPCPAPELLGGPSVFLFPPKPKDTLMISRTPEVTCVVVDVSHEDPEVKFNWYVDGVEVHNAKTKPCEEQYGSTYRCVSVLTVLHQDWLNGKEYKCKVSNKALPAPIEKTISKAKGQPREPQVYTLPPSREEMTKNQVSLTCLVKGFYPSDIAVEWESNGQPENNYKTTPPVLDSDGSFFLYSKLTVDKSRWQQGNVFSCSVMHEALHNHYTQKSLSLSPGKGGGGSGGGGSGGGGSGGGGSGGGGSGGGGSDKTHTCPPCPAPELLGGPSVFLFPPKPKDTLMISRTPEVTCVVVDVSHEDPEVKFNWYVDGVEVHNAKTKPCEEQYGSTYRCVSVLTVLHQDWLNGKEYKCKVSNKALPAPIEKTISKAKGQPREPQVYTLPPSREEMTKNQVSLTCLVKGFYPSDIAVEWESNGQPENNYKTTPPVLDSDGSFFLYSKLTVDKSRWQQGNVFSCSVMHEALHNHYTQKSLSLSPGK

SEQ ID NO: 3577 - protein, 489 aa, Artificial Sequence
  Synthetic
EVQLLESGGGLVQPGGSLRLSCAASGYTFSSYWMHWVRQAPGKCLEWMGVISGSKSYTIYNQKVKGRFTISRDNSKNTVYLQMNSLRAGDTAVYYCARSGPGYFDVWGQGTMVTVSSGGGGSGGGGSGGGGSDIQLTQSPSFLSASVGDRVTITCRASENIYSYLAWYQQKPGKAPKLLIYNAKTLAEGVPSRFSGSGSGTEFTLTISSLQPEDFGTYYCQHLNMTPYTFGCGTKLEIKSGGGGSQVQLQESGPGLVKPSETLSLTCTVSGGSISSSSYFWVWIRQPPGKCLEWIGSIYYSGSTYYNPSLKSRVTISVDTSKNQFSLKLNSVTAADTAVYYCARLPRGDRMTFDIWGQGTMVTVSSGGGGSGGGGSGGGGSEIVLTQSPGTLSLSPGERATLSCRASQSVSSSYLAWYQQKPGQAPRLLIYGASSRATGIPDRFSGSGSGTDFTLTISRLEPEDFAVYYCQQYGSSPFTFGCGTKLEIK

SEQ ID NO: 3578 - protein, 744 aa, Artificial Sequence
  Synthetic
EVQLLESGGGLVQPGGSLRLSCAASGYTFSSYWMHWVRQAPGKCLEWMGVISGSKSYTIYNQKVKGRFTISRDNSKNTVYLQMNSLRAGDTAVYYCARSGPGYFDVWGQGTMVTVSSGGGGSGGGGSGGGGSDIQLTQSPSFLSASVGDRVTITCRASENIYSYLAWYQQKPGKAPKLLIYNAKTLAEGVPSRFSGSGSGTEFTLTISSLQPEDFGTYYCQHLNMTPYTFGCGTKLEIKSGGGGSQVQLQESGPGLVKPSETLSLTCTVSGGSISSSSYFWVWIRQPPGKCLEWIGSIYYSGSTYYNPSLKSRVTISVDTSKNQFSLKLNSVTAADTAVYYCARLPRGDRMTFDIWGQGTMVTVSSGGGGSGGGGSGGGGSEIVLTQSPGTLSLSPGERATLSCRASQSVSSSYLAWYQQKPGQAPRLLIYGASSRATGIPDRFSGSGSGTDFTLTISRLEPEDFAVYYCQQYGSSPFTFGCGTKLEIKSGGGGSEVQLVESGGGLVQPGGSLKLSCAASGFTFNKYAMNWVRQAPGKGLEWVARIRSKYNNYATYYADSVKDRFTISRDDSKNTAYLQMNNLKTEDTAVYYCVRHGNFGNSYISYWAYWGQGTLVTVSSGGGGSGGGGSGGGGSQTVVTQEPSLTVSPGGTVTLTCGSSTGAVTSGNYPNWVQQKPGQAPRGLIGGTKFLAPGTPARFSGSLLGGKAALTLSGVQPEDEAEYYCVLWYSNRWVFGGGTKLTVL

SEQ ID NO: 3579 - protein, 1232 aa, Artificial Sequence
  Synthetic
EVQLLESGGGLVQPGGSLRLSCAASGYTFSSYWMHWVRQAPGKCLEWMGVISGSKSYTIYNQKVKGRFTISRDNSKNTVYLQMNSLRAGDTAVYYCARSGPGYFDVWGQGTMVTVSSGGGGSGGGGSGGGGSDIQLTQSPSFLSASVGDRVTITCRASENIYSYLAWYQQKPGKAPKLLIYNAKTLAEGVPSRFSGSGSGTEFTLTISSLQPEDFGTYYCQHLNMTPYTFGCGTKLEIKSGGGGSQVQLQESGPGLVKPSETLSLTCTVSGGSISSSSYFWVWIRQPPGKCLEWIGSIYYSGSTYYNPSLKSRVTISVDTSKNQFSLKLNSVTAADTAVYYCARLPRGDRMTFDIWGQGTMVTVSSGGGGSGGGGSGGGGSEIVLTQSPGTLSLSPGERATLSCRASQSVSSSYLAWYQQKPGQAPRLLIYGASSRATGIPDRFSGSGSGTDFTLTISRLEPEDFAVYYCQQYGSSPFTFGCGTKLEIKSGGGGSEVQLVESGGGLVQPGGSLKLSCAASGFTFNKYAMNWVRQAPGKGLEWVARIRSKYNNYATYYADSVKDRFTISRDDSKNTAYLQMNNLKTEDTAVYYCVRHGNFGNSYISYWAYWGQGTLVTVSSGGGGSGGGGSGGGGSQTVVTQEPSLTVSPGGTVTLTCGSSTGAVTSGNYPNWVQQKPGQAPRGLIGGTKFLAPGTPARFSGSLLGGKAALTLSGVQPEDEAEYYCVLWYSNRWVFGGGTKLTVLGGGGDKTHTCPPCPAPELLGGPSVFLFPPKPKDTLMISRTPEVTCVVVDVSHEDPEVKFNWYVDGVEVHNAKTKPCEEQYGSTYRCVSVLTVLHQDWLNGKEYKCKVSNKALPAPIEKTISKAKGQPREPQVYTLPPSREEMTKNQVSLTCLVKGFYPSDIAVEWESNGQPENNYKTTPPVLDSDGSFFLYSKLTVDKSRWQQGNVFSCSVMHEALHNHYTQKSLSLSPGKGGGGSGGGGSGGGGSGGGGSGGGGSGGGGSDKTHTCPPCPAPELLGGPSVFLFPPKPKDTLMISRTPEVTCVVVDVSHEDPEVKFNWYVDGVEVHNAKTKPCEEQYGSTYRCVSVLTVLHQDWLNGKEYKCKVSNKALPAPIEKTISKAKGQPREPQVYTLPPSREEMTKNQVSLTCLVKGFYPSDIAVEWESNGQPENNYKTTPPVLDSDGSFFLYSKLTVDKSRWQQGNVFSCSVMHEALHNHYTQKSLSLSPGK

SEQ ID NO: 3580 - protein, 495 aa, Artificial Sequence
  Synthetic
EVQLLESGGGLVQPGGSLRLSCAASGFSFSSYPINWVRQAPGKCLEWVGVIWTGGGTNYASSVKGRFTISRDNSKNTVYLQMNSLRAEDTAVYYCAKSRGVYDFKGRGAMDYWGQGTLVTVSSGGGGSGGGGSGGGGSDIVMTQSPDSLAVSLGERATINCKSSQSLLYSSNQKNYFAWYQQKPGQPPKLLIYWASTRESGVPDRFSGSGSGTDFTLTISSLQAEDVAVYYCQQYYSYPYTFGCGTKLEIKSGGGGSQVQLVESGGGLVKPGGSLRLSCAASGFTFSDYYMTWIRQAPGKCLEWLSYISSSGSTIYYAEAVKGRFTISRDNAKNSLFLQMNSLRAEDTAVYYCARDRNSHFDYWGQGTLVTVSSGGGGSGGGGSGGGGSDIMTQSPSSVSASVGDRVTITCRASQGIRTWLAWYQQKPGKAPKLLIYGASGLQSGVPSRFSGSGSGTDFTLTISSLQPEDFATYYCQQAESFPRTFGCGTKVEIK

SEQ ID NO: 3581 - protein, 750 aa, Artificial Sequence
  Synthetic
EVQLLESGGGLVQPGGSLRLSCAASGFSFSSYPINWVRQAPGKCLEWVGVIWTGGGTNYASSVKGRFTISRDNSKNTVYLQMNSLRAEDTAVYYCAKSRGVYDFKGRGAMDYWGQGTLVTVSSGGGGSGGGGSGGGGSDIVMTQSPDSLAVSLGERATINCKSSQSLLYSSNQKNYFAWYQQKPGQPPKLLIYWASTRESGVPDRFSGSGSGTDFTLTISSLQAEDVAVYYCQQYYSYPYTFGCGTKLEIKSGGGGSQVQLVESGGGLVKPGGSLRLSCAASGFTFSDYYMTWIRQAPGKCLEWLSYISSSGSTIYYAEAVKGRFTISRDNAKNSLFLQMNSLRAEDTAVYYCARDRNSHFDYWGQGTLVTVSSGGGGSGGGGSGGGGSDIMTQSPSSVSASVGDRVTITCRASQGIRTWLAWYQQKPGKAPKLLIYGASGLQSGVPSRFSGSGSGTDFTLTISSLQPEDFATYYCQQAESFPRTFGCGTKVEIKSGGGGSEVQLVESGGGLVQPGGSLKLSCAASGFTFNKYAMNWVRQAPGKGLEWVARIRSKYNNYATYYADSVKDRFTISRDDSKNTAYLQMNNLKTEDTAVYYCVRHGNFGNSYISYWAYWGQGTLVTVSSGGGGSGGGGSGGGGSQTVVTQEPSLTVSPGGTVTLTCGSSTGAVTSGNYPNWVQQKPGQAPRGLIGGTKFLAPGTPARFSGSLLGGKAALTLSGVQPEDEAEYYCVLWYSNRWVFGGGTKLTVL

SEQ ID NO: 3582 - protein, 1238 aa, Artificial Sequence
  Synthetic
EVQLLESGGGLVQPGGSLRLSCAASGFSFSSYPINWVRQAPGKCLEWVGVIWTGGGTNYASSVKGRFTISRDNSKNTVYLQMNSLRAEDTAVYYCAKSRGVYDFKGRGAMDYWGQGTLVTVSSGGGGSGGGGSGGGGSDIVMTQSPDSLAVSLGERATINCKSSQSLLYSSNQKNYFAWYQQKPGQPPKLLIYWASTRESGVPDRFSGSGSGTDFTLTISSLQAEDVAVYYCQQYYSYPYTFGCGTKLEIKSGGGGSQVQLVESGGGLVKPGGSLRLSCAASGFTFSDYYMTWIRQAPGKCLEWLSYISSSGSTIYYAEAVKGRFTISRDNAKNSLFLQMNSLRAEDTAVYYCARDRNSHFDYWGQGTLVTVSSGGGGSGGGGSGGGGSDIMTQSPSSVSASVGDRVTITCRASQGIRTWLAWYQQKPGKAPKLLIYGASGLQSGVPSRFSGSGSGTDFTLTISSLQPEDFATYYCQQAESFPRTFGCGTKVEIKSGGGGSEVQLVESGGGLVQPGGSLKLSCAASGFTFNKYAMNWVRQAPGKGLEWVARIRSKYNNYATYYADSVKDRFTISRDDSKNTAYLQMNNLKTEDTAVYYCVRHGNFGNSYISYWAYWGQGTLVTVSSGGGGSGGGGSGGGGSQTVVTQEPSLTVSPGGTVTLTCGSSTGAVTSGNYPNWVQQKPGQAPRGLIGGTKFLAPGTPARFSGSLLGGKAALTLSGVQPEDEAEYYCVLWYSNRWVFGGGTKLTVLGGGGDKTHTCPPCPAPELLGGPSVFLFPPKPKDTLMISRTPEVTCVVVDVSHEDPEVKFNWYVDGVEVHNAKTKPCEEQYGSTYRCVSVLTVLHQDWLNGKEYKCKVSNKALPAPIEKTISKAKGQPREPQVYTLPPSREEMTKNQVSLTCLVKGFYPSDIAVEWESNGQPENNYKTTPPVLDSDGSFFLYSKLTVDKSRWQQGNVFSCSVMHEALHNHYTQKSLSLSPGKGGGGSGGGGSGGGGSGGGGSGGGGSGGGGSDKTHTCPPCPAPELLGGPSVFLFPPKPKDTLMISRTPEVTCVVVDVSHEDPEVKFNWYVDGVEVHNAKTKPCEEQYGSTYRCVSVLTVLHQDWLNGKEYKCKVSNKALPAPIEKTISKAKGQPREPQVYTLPPSREEMTKNQVSLTCLVKGFYPSDIAVEWESNGQPENNYKTTPPVLDSDGSFFLYSKLTVDKSRWQQGNVFSCSVMHEALHNHYTQKSLSLSPGK

SEQ ID NO: 3583 - protein, 509 aa, Artificial Sequence
  Synthetic
EVQLLESGGGLVQPGGSLRLSCAASGFSFSSYPINWVRQAPGKCLEWVGVIWTGGGTNYASSVKGRFTISRDNSKNTVYLQMNSLRAEDTAVYYCAKSRGVYDFKGRGAMDYWGQGTLVTVSSGGGGSGGGGSGGGGSDIVMTQSPDSLAVSLGERATINCKSSQSLLYSSNQKNYFAWYQQKPGQPPKLLIYWASTRESGVPDRFSGSGSGTDFTLTISSLQAEDVAVYYCQQYYSYPYTFGCGTKLEIKSGGGGSEVQLLESGGGLVQPGGSLRLSCAASGFTFSSYAMSWVRQAPGKCLEWVSAISGSGGSTYYAIDVKGRFTISRDNSKNTLYLQMNSLRAEDTAVYYCAKEGYYPGSGYPLYYYFGMDVWGQGTTVTVSSGGGGSGGGGSGGGGSEIVLTQSPGTLSLSPGERATLSCRASQSVSSSYLAWYQQKPGQAPRLLIYGASSRATGIPDRFSGSGSGTDFTLTISRLEPEDFAVYYCQQYGSSPIFTFGCGTKVEIK

SEQ ID NO: 3584 - protein, 764 aa, Artificial Sequence
  Synthetic
EVQLLESGGGLVQPGGSLRLSCAASGFSFSSYPINWVRQAPGKCLEWVGVIWTGGGTNYASSVKGRFTISRDNSKNTVYLQMNSLRAEDTAVYYCAKSRGVYDFKGRGAMDYWGQGTLVTVSSGGGGSGGGGSGGGGSDIVMTQSPDSLAVSLGERATINCKSSQSLLYSSNQKNYFAWYQQKPGQPPKLLIYWASTRESGVPDRFSGSGSGTDFTLTISSLQAEDVAVYYCQQYYSYPYTFGCGTKLEIKSGGGGSEVQLLESGGGLVQPGGSLRLSCAASGFTFSSYAMSWVRQAPGKCLEWVSAISGSGGSTYYAIDVKGRFTISRDNSKNTLYLQMNSLRAEDTAVYYCAKEGYYPGSGYPLYYYFGMDVWGQGTTVTVSSGGGGSGGGGSGGGGSEIVLTQSPGTLSLSPGERATLSCRASQSVSSSYLAWYQQKPGQAPRLLIYGASSRATGIPDRFSGSGSGTDFTLTISRLEPEDFAVYYCQQYGSSPIFTFGCGTKVEIKSGGGGSEVQLVESGGGLVQPGGSLKLSCAASGFTFNKYAMNWVRQAPGKGLEWVARIRSKYNNYATYYADSVKDRFTISRDDSKNTAYLQMNNLKTEDTAVYYCVRHGNFGNSYISYWAYWGQGTLVTVSSGGGGSGGGGSGGGGSQTVVTQEPSLTVSPGGTVTLTCGSSTGAVTSGNYPNWVQQKPGQAPRGLIGGTKFLAPGTPARFSGSLLGGKAALTLSGVQPEDEAEYYCVLWYSNRWVFGGGTKLTVL

SEQ ID NO: 3585 - protein, 1252 aa, Artificial Sequence
  Synthetic
EVQLLESGGGLVQPGGSLRLSCAASGFSFSSYPINWVRQAPGKCLEWVGVIWTGGGTNYASSVKGRFTISRDNSKNTVYLQMNSLRAEDTAVYYCAKSRGVYDFKGRGAMDYWGQGTLVTVSSGGGGSGGGGSGGGGSDIVMTQSPDSLAVSLGERATINCKSSQSLLYSSNQKNYFAWYQQKPGQPPKLLIYWASTRESGVPDRFSGSGSGTDFTLTISSLQAEDVAVYYCQQYYSYPYTFGCGTKLEIKSGGGGSEVQLLESGGGLVQPGGSLRLSCAASGFTFSSYAMSWVRQAPGKCLEWVSAISGSGGSTYYAIDVKGRFTISRDNSKNTLYLQMNSLRAEDTAVYYCAKEGYYPGSGYPLYYYFGMDVWGQGTTVTVSSGGGGSGGGGSGGGGSEIVLTQSPGTLSLSPGERATLSCRASQSVSSSYLAWYQQKPGQAPRLLIYGASSRATGIPDRFSGSGSGTDFTLTISRLEPEDFAVYYCQQYGSSPIFTFGCGTKVEIKSGGGGSEVQLVESGGGLVQPGGSLKLSCAASGFTFNKYAMNWVRQAPGKGLEWVARIRSKYNNYATYYADSVKDRFTISRDDSKNTAYLQMNNLKTEDTAVYYCVRHGNFGNSYISYWAYWGQGTLVTVSSGGGGSGGGGSGGGGSQTVVTQEPSLTVSPGGTVTLTCGSSTGAVTSGNYPNWVQQKPGQAPRGLIGGTKFLAPGTPARFSGSLLGGKAALTLSGVQPEDEAEYYCVLWYSNRWVFGGGTKLTVLGGGGDKTHTCPPCPAPELLGGPSVFLFPPKPKDTLMISRTPEVTCVVVDVSHEDPEVKFNWYVDGVEVHNAKTKPCEEQYGSTYRCVSVLTVLHQDWLNGKEYKCKVSNKALPAPIEKTISKAKGQPREPQVYTLPPSREEMTKNQVSLTCLVKGFYPSDIAVEWESNGQPENNYKTTPPVLDSDGSFFLYSKLTVDKSRWQQGNVFSCSVMHEALHNHYTQKSLSLSPGKGGGGSGGGGSGGGGSGGGGSGGGGSGGGGSDKTHTCPPCPAPELLGGPSVFLFPPKPKDTLMISRTPEVTCVVVDVSHEDPEVKFNWYVDGVEVHNAKTKPCEEQYGSTYRCVSVLTVLHQDWLNGKEYKCKVSNKALPAPIEKTISKAKGQPREPQVYTLPPSREEMTKNQVSLTCLVKGFYPSDIAVEWESNGQPENNYKTTPPVLDSDGSFFLYSKLTVDKSRWQQGNVFSCSVMHEALHNHYTQKSLSLSPGK

SEQ ID NO: 3586 - protein, 510 aa, Artificial Sequence
  Synthetic
EVQLLESGGGLVQPGGSLRLSCAASGFSFSSYPINWVRQAPGKCLEWVGVIWTGGGTNYASSVKGRFTISRDNSKNTVYLQMNSLRAEDTAVYYCAKSRGVYDFKGRGAMDYWGQGTLVTVSSGGGGSGGGGSGGGGSDIVMTQSPDSLAVSLGERATINCKSSQSLLYSSNQKNYFAWYQQKPGQPPKLLIYWASTRESGVPDRFSGSGSGTDFTLTISSLQAEDVAVYYCQQYYSYPYTFGCGTKLEIKSGGGGSQVQLVESGGGVVQPGRSLRLSCAASGFTFSSYGMGWVRQAPGKCLEWVAVISYHGSNKYYADAVKGRFTISRDNSKNTLYLQMNSLRAEDTAVYYCAREGAHFGSGSYYPLYYYYAMDVWGQGTTVTVSSGGGGSGGGGSGGGGSEIVTQSPGTLSLSPGERATLSCRASQSVSSSYLAWYQQKPGQAPRLLIYGASIRATGIPDRFSGSGSGTDFTLTISRLEPEDFAVYYCQQTGSSPIFTFGCGTKVEIK

SEQ ID NO: 3587 - protein, 765 aa, Artificial Sequence
  Synthetic
EVQLLESGGGLVQPGGSLRLSCAASGFSFSSYPINWVRQAPGKCLEWVGVIWTGGGTNYASSVKGRFTISRDNSKNTVYLQMNSLRAEDTAVYYCAKSRGVYDFKGRGAMDYWGQGTLVTVSSGGGGSGGGGSGGGGSDIVMTQSPDSLAVSLGERATINCKSSQSLLYSSNQKNYFAWYQQKPGQPPKLLIYWASTRESGVPDRFSGSGSGTDFTLTISSLQAEDVAVYYCQQYYSYPYTFGCGTKLEIKSGGGGSQVQLVESGGGVVQPGRSLRLSCAASGFTFSSYGMGWVRQAPGKCLEWVAVISYHGSNKYYADAVKGRFTISRDNSKNTLYLQMNSLRAEDTAVYYCAREGAHFGSGSYYPLYYYYAMDVWGQGTTVTVSSGGGGSGGGGSGGGGSEIVTQSPGTLSLSPGERATLSCRASQSVSSSYLAWYQQKPGQAPRLLIYGASIRATGIPDRFSGSGSGTDFTLTISRLEPEDFAVYYCQQTGSSPIFTFGCGTKVEIKSGGGGSEVQLVESGGGLVQPGGSLKLSCAASGFTFNKYAMNWVRQAPGKGLEWVARIRSKYNNYATYYADSVKDRFTISRDDSKNTAYLQMNNLKTEDTAVYYCVRHGNFGNSYISYWAYWGQGTLVTVSSGGGGSGGGGSGGGGSQTVVTQEPSLTVSPGGTVTLTCGSSTGAVTSGNYPNWVQQKPGQAPRGLIGGTKFLAPGTPARFSGSLLGGKAALTLSGVQPEDEAEYYCVLWYSNRWVFGGGTKLTVL

SEQ ID NO: 3588 - protein, 1253 aa, Artificial Sequence
  Synthetic
EVQLLESGGGLVQPGGSLRLSCAASGFSFSSYPINWVRQAPGKCLEWVGVIWTGGGTNYASSVKGRFTISRDNSKNTVYLQMNSLRAEDTAVYYCAKSRGVYDFKGRGAMDYWGQGTLVTVSSGGGGSGGGGSGGGGSDIVMTQSPDSLAVSLGERATINCKSSQSLLYSSNQKNYFAWYQQKPGQPPKLLIYWASTRESGVPDRFSGSGSGTDFTLTISSLQAEDVAVYYCQQYYSYPYTFGCGTKLEIKSGGGGSQVQLVESGGGVVQPGRSLRLSCAASGFTFSSYGMGWVRQAPGKCLEWVAVISYHGSNKYYADAVKGRFTISRDNSKNTLYLQMNSLRAEDTAVYYCAREGAHFGSGSYYPLYYYYAMDVWGQGTTVTVSSGGGGSGGGGSGGGGSEIVTQSPGTLSLSPGERATLSCRASQSVSSSYLAWYQQKPGQAPRLLIYGASIRATGIPDRFSGSGSGTDFTLTISRLEPEDFAVYYCQQTGSSPIFTFGCGTKVEIKSGGGGSEVQLVESGGGLVQPGGSLKLSCAASGFTFNKYAMNWVRQAPGKGLEWVARIRSKYNNYATYYADSVKDRFTISRDDSKNTAYLQMNNLKTEDTAVYYCVRHGNFGNSYISYWAYWGQGTLVTVSSGGGGSGGGGSGGGGSQTVVTQEPSLTVSPGGTVTLTCGSSTGAVTSGNYPNWVQQKPGQAPRGLIGGTKFLAPGTPARFSGSLLGGKAALTLSGVQPEDEAEYYCVLWYSNRWVFGGGTKLTVLGGGGDKTHTCPPCPAPELLGGPSVFLFPPKPKDTLMISRTPEVTCVVVDVSHEDPEVKFNWYVDGVEVHNAKTKPCEEQYGSTYRCVSVLTVLHQDWLNGKEYKCKVSNKALPAPIEKTISKAKGQPREPQVYTLPPSREEMTKNQVSLTCLVKGFYPSDIAVEWESNGQPENNYKTTPPVLDSDGSFFLYSKLTVDKSRWQQGNVFSCSVMHEALHNHYTQKSLSLSPGKGGGGSGGGGSGGGGSGGGGSGGGGSGGGGSDKTHTCPPCPAPELLGGPSVFLFPPKPKDTLMISRTPEVTCVVVDVSHEDPEVKFNWYVDGVEVHNAKTKPCEEQYGSTYRCVSVLTVLHQDWLNGKEYKCKVSNKALPAPIEKTISKAKGQPREPQVYTLPPSREEMTKNQVSLTCLVKGFYPSDIAVEWESNGQPENNYKTTPPVLDSDGSFFLYSKLTVDKSRWQQGNVFSCSVMHEALHNHYTQKSLSLSPGK

SEQ ID NO: 3589 - protein, 504 aa, Artificial Sequence
  Synthetic
EVQLLESGGGLVQPGGSLRLSCAASGFSFSSYPINWVRQAPGKCLEWVGVIWTGGGTNYASSVKGRFTISRDNSKNTVYLQMNSLRAEDTAVYYCAKSRGVYDFKGRGAMDYWGQGTLVTVSSGGGGSGGGGSGGGGSDIVMTQSPDSLAVSLGERATINCKSSQSLLYSSNQKNYFAWYQQKPGQPPKLLIYWASTRESGVPDRFSGSGSGTDFTLTISSLQAEDVAVYYCQQYYSYPYTFGCGTKLEIKSGGGGSQVQLVQSGAEVKKPGASVKVSCKASGYTFTGYYIHWVRQAPGQCLEWMGWINPNSGGTNYAQKFQGRVTMTRDTSISTAYMELSRLRSDDTAVYYCARVEAVAGREYYYFSGMDVWGQGTTVTVSSGGGGSGGGGSGGGGSSYELTQPPSVSVSPGQTASITCSGEKLGDKYVYWYQQKPGQSPVLVIYQSTKRPSGVPERFSGSNSGNTATLTISGTQAMDEADYYCQAYHASTAVFGCGTKLTVL

SEQ ID NO: 3590 - protein, 759 aa, Artificial Sequence
  Synthetic
EVQLLESGGGLVQPGGSLRLSCAASGFSFSSYPINWVRQAPGKCLEWVGVIWTGGGTNYASSVKGRFTISRDNSKNTVYLQMNSLRAEDTAVYYCAKSRGVYDFKGRGAMDYWGQGTLVTVSSGGGGSGGGGSGGGGSDIVMTQSPDSLAVSLGERATINCKSSQSLLYSSNQKNYFAWYQQKPGQPPKLLIYWASTRESGVPDRFSGSGSGTDFTLTISSLQAEDVAVYYCQQYYSYPYTFGCGTKLEIKSGGGGSQVQLVQSGAEVKKPGASVKVSCKASGYTFTGYYIHWVRQAPGQCLEWMGWINPNSGGTNYAQKFQGRVTMTRDTSISTAYMELSRLRSDDTAVYYCARVEAVAGREYYYFSGMDVWGQGTTVTVSSGGGGSGGGGSGGGGSSYELTQPPSVSVSPGQTASITCSGEKLGDKYVYWYQQKPGQSPVLVIYQSTKRPSGVPERFSGSNSGNTATLTISGTQAMDEADYYCQAYHASTAVFGCGTKLTVLSGGGGSEVQLVESGGGLVQPGGSLKLSCAASGFTFNKYAMNWVRQAPGKGLEWVARIRSKYNNYATYYADSVKDRFTISRDDSKNTAYLQMNNLKTEDTAVYYCVRHGNFGNSYISYWAYWGQGTLVTVSSGGGGSGGGGSGGGGSQTVVTQEPSLTVSPGGTVTLTCGSSTGAVTSGNYPNWVQQKPGQAPRGLIGGTKFLAPGTPARFSGSLLGGKAALTLSGVQPEDEAEYYCVLWYSNRWVFGGGTKLTVL

SEQ ID NO: 3591 - protein, 1247 aa, Artificial Sequence
  Synthetic
EVQLLESGGGLVQPGGSLRLSCAASGFSFSSYPINWVRQAPGKCLEWVGVIWTGGGTNYASSVKGRFTISRDNSKNTVYLQMNSLRAEDTAVYYCAKSRGVYDFKGRGAMDYWGQGTLVTVSSGGGGSGGGGSGGGGSDIVMTQSPDSLAVSLGERATINCKSSQSLLYSSNQKNYFAWYQQKPGQPPKLLIYWASTRESGVPDRFSGSGSGTDFTLTISSLQAEDVAVYYCQQYYSYPYTFGCGTKLEIKSGGGGSQVQLVQSGAEVKKPGASVKVSCKASGYTFTGYYIHWVRQAPGQCLEWMGWINPNSGGTNYAQKFQGRVTMTRDTSISTAYMELSRLRSDDTAVYYCARVEAVAGREYYYFSGMDVWGQGTTVTVSSGGGGSGGGGSGGGGSSYELTQPPSVSVSPGQTASITCSGEKLGDKYVYWYQQKPGQSPVLVIYQSTKRPSGVPERFSGSNSGNTATLTISGTQAMDEADYYCQAYHASTAVFGCGTKLTVLSGGGGSEVQLVESGGGLVQPGGSLKLSCAASGFTFNKYAMNWVRQAPGKGLEWVARIRSKYNNYATYYADSVKDRFTISRDDSKNTAYLQMNNLKTEDTAVYYCVRHGNFGNSYISYWAYWGQGTLVTVSSGGGGSGGGGSGGGGSQTVVTQEPSLTVSPGGTVTLTCGSSTGAVTSGNYPNWVQQKPGQAPRGLIGGTKFLAPGTPARFSGSLLGGKAALTLSGVQPEDEAEYYCVLWYSNRWVFGGGTKLTVLGGGGDKTHTCPPCPAPELLGGPSVFLFPPKPKDTLMISRTPEVTCVVVDVSHEDPEVKFNWYVDGVEVHNAKTKPCEEQYGSTYRCVSVLTVLHQDWLNGKEYKCKVSNKALPAPIEKTISKAKGQPREPQVYTLPPSREEMTKNQVSLTCLVKGFYPSDIAVEWESNGQPENNYKTTPPVLDSDGSFFLYSKLTVDKSRWQQGNVFSCSVMHEALHNHYTQKSLSLSPGKGGGGSGGGGSGGGGSGGGGSGGGGSGGGGSDKTHTCPPCPAPELLGGPSVFLFPPKPKDTLMISRTPEVTCVVVDVSHEDPEVKFNWYVDGVEVHNAKTKPCEEQYGSTYRCVSVLTVLHQDWLNGKEYKCKVSNKALPAPIEKTISKAKGQPREPQVYTLPPSREEMTKNQVSLTCLVKGFYPSDIAVEWESNGQPENNYKTTPPVLDSDGSFFLYSKLTVDKSRWQQGNVFSCSVMHEALHNHYTQKSLSLSPGK

SEQ ID NO: 3592 - protein, 495 aa, Artificial Sequence
  Synthetic
EVQLLESGGGLVQPGGSLRLSCAASGFSFSSYPINWVRQAPGKCLEWVGVIWTGGGTNYASSVKGRFTISRDNSKNTVYLQMNSLRAEDTAVYYCAKSRGVYDFDLRGAMDYWGQGTLVTVSSGGGGSGGGGSGGGGSDIVMTQSPDSLAVSLGERATINCKSSQSLLYSSNQKNYFAWYQQKPGQPPKLLIYWASTRESGVPDRFSGSGSGTDFTLTISSLQAEDVAVYYCQQYYSYPYTFGCGTKLEIKSGGGGSQVQLVESGGGLVKPGGSLRLSCAASGFTFSDYYMTWIRQAPGKCLEWLSYISSSGSTIYYAEAVKGRFTISRDNAKNSLFLQMNSLRAEDTAVYYCARDRNSHFDYWGQGTLVTVSSGGGGSGGGGSGGGGSDIMTQSPSSVSASVGDRVTITCRASQGIRTWLAWYQQKPGKAPKLLIYGASGLQSGVPSRFSGSGSGTDFTLTISSLQPEDFATYYCQQAESFPRTFGCGTKVEIK

SEQ ID NO: 3593 - protein, 750 aa, Artificial Sequence
  Synthetic
EVQLLESGGGLVQPGGSLRLSCAASGFSFSSYPINWVRQAPGKCLEWVGVIWTGGGTNYASSVKGRFTISRDNSKNTVYLQMNSLRAEDTAVYYCAKSRGVYDFDLRGAMDYWGQGTLVTVSSGGGGSGGGGSGGGGSDIVMTQSPDSLAVSLGERATINCKSSQSLLYSSNQKNYFAWYQQKPGQPPKLLIYWASTRESGVPDRFSGSGSGTDFTLTISSLQAEDVAVYYCQQYYSYPYTFGCGTKLEIKSGGGGSQVQLVESGGGLVKPGGSLRLSCAASGFTFSDYYMTWIRQAPGKCLEWLSYISSSGSTIYYAEAVKGRFTISRDNAKNSLFLQMNSLRAEDTAVYYCARDRNSHFDYWGQGTLVTVSSGGGGSGGGGSGGGGSDIMTQSPSSVSASVGDRVTITCRASQGIRTWLAWYQQKPGKAPKLLIYGASGLQSGVPSRFSGSGSGTDFTLTISSLQPEDFATYYCQQAESFPRTFGCGTKVEIKSGGGGSEVQLVESGGGLVQPGGSLKLSCAASGFTFNKYAMNWVRQAPGKGLEWVARIRSKYNNYATYYADSVKDRFTISRDDSKNTAYLQMNNLKTEDTAVYYCVRHGNFGNSYISYWAYWGQGTLVTVSSGGGGSGGGGSGGGGSQTVVTQEPSLTVSPGGTVTLTCGSSTGAVTSGNYPNWVQQKPGQAPRGLIGGTKFLAPGTPARFSGSLLGGKAALTLSGVQPEDEAEYYCVLWYSNRWVFGGGTKLTVL

SEQ ID NO: 3594 - protein, 1238 aa, Artificial Sequence
  Synthetic
EVQLLESGGGLVQPGGSLRLSCAASGFSFSSYPINWVRQAPGKCLEWVGVIWTGGGTNYASSVKGRFTISRDNSKNTVYLQMNSLRAEDTAVYYCAKSRGVYDFDLRGAMDYWGQGTLVTVSSGGGGSGGGGSGGGGSDIVMTQSPDSLAVSLGERATINCKSSQSLLYSSNQKNYFAWYQQKPGQPPKLLIYWASTRESGVPDRFSGSGSGTDFTLTISSLQAEDVAVYYCQQYYSYPYTFGCGTKLEIKSGGGGSQVQLVESGGGLVKPGGSLRLSCAASGFTFSDYYMTWIRQAPGKCLEWLSYISSSGSTIYYAEAVKGRFTISRDNAKNSLFLQMNSLRAEDTAVYYCARDRNSHFDYWGQGTLVTVSSGGGGSGGGGSGGGGSDIMTQSPSSVSASVGDRVTITCRASQGIRTWLAWYQQKPGKAPKLLIYGASGLQSGVPSRFSGSGSGTDFTLTISSLQPEDFATYYCQQAESFPRTFGCGTKVEIKSGGGGSEVQLVESGGGLVQPGGSLKLSCAASGFTFNKYAMNWVRQAPGKGLEWVARIRSKYNNYATYYADSVKDRFTISRDDSKNTAYLQMNNLKTEDTAVYYCVRHGNFGNSYISYWAYWGQGTLVTVSSGGGGSGGGGSGGGGSQTVVTQEPSLTVSPGGTVTLTCGSSTGAVTSGNYPNWVQQKPGQAPRGLIGGTKFLAPGTPARFSGSLLGGKAALTLSGVQPEDEAEYYCVLWYSNRWVFGGGTKLTVLGGGGDKTHTCPPCPAPELLGGPSVFLFPPKPKDTLMISRTPEVTCVVVDVSHEDPEVKFNWYVDGVEVHNAKTKPCEEQYGSTYRCVSVLTVLHQDWLNGKEYKCKVSNKALPAPIEKTISKAKGQPREPQVYTLPPSREEMTKNQVSLTCLVKGFYPSDIAVEWESNGQPENNYKTTPPVLDSDGSFFLYSKLTVDKSRWQQGNVFSCSVMHEALHNHYTQKSLSLSPGKGGGGSGGGGSGGGGSGGGGSGGGGSGGGGSDKTHTCPPCPAPELLGGPSVFLFPPKPKDTLMISRTPEVTCVVVDVSHEDPEVKFNWYVDGVEVHNAKTKPCEEQYGSTYRCVSVLTVLHQDWLNGKEYKCKVSNKALPAPIEKTISKAKGQPREPQVYTLPPSREEMTKNQVSLTCLVKGFYPSDIAVEWESNGQPENNYKTTPPVLDSDGSFFLYSKLTVDKSRWQQGNVFSCSVMHEALHNHYTQKSLSLSPGK

SEQ ID NO: 3595 - protein, 491 aa, Artificial Sequence
  Synthetic
EVQLLESGGGLVQPGGSLRLSCAASGFTFSSYWMHWVRQTPGKCLEWVSKIDPSDDYTNYNQKVKGRFTISIDKSKNTLYLQMNSLRAEDTAVYYCARWDYNYFDVWGQGTTVTVSSGGGGSGGGGSGGGGSEIVMTQSPATLSVSPGERATLTCRASSSVSYMHWYQQKPGQAPRLLIYGTSNLVSGVPARFSGSGSGTEFTLTISSLQSEDFAVYYCQQWSSYPLTFGCGTKVEIKSGGGGSQVQLVQSGAEVKKPGASVKVSCKASGYTFTGYYIHWVRQAPGQCLEWMGWINPNSGGTNYAQKFQGRVTMTRDTSISTAYMELSRLRSDDTAVYYCARVEAVAGREYYYFSGMDVWGQGTTVTVSSGGGGSGGGGSGGGGSSYELTQPPSVSVSPGQTASITCSGEKLGDKYVYWYQQKPGQSPVLVIYQSTKRPSGVPERFSGSNSGNTATLTISGTQAMDEADYYCQAYHASTAVFGCGTKLTVL

SEQ ID NO: 3596 - protein, 746 aa, Artificial Sequence
  Synthetic
EVQLLESGGGLVQPGGSLRLSCAASGFTFSSYWMHWVRQTPGKCLEWVSKIDPSDDYTNYNQKVKGRFTISIDKSKNTLYLQMNSLRAEDTAVYYCARWDYNYFDVWGQGTTVTVSSGGGGSGGGGSGGGGSEIVMTQSPATLSVSPGERATLTCRASSSVSYMHWYQQKPGQAPRLLIYGTSNLVSGVPARFSGSGSGTEFTLTISSLQSEDFAVYYCQQWSSYPLTFGCGTKVEIKSGGGGSQVQLVQSGAEVKKPGASVKVSCKASGYTFTGYYIHWVRQAPGQCLEWMGWINPNSGGTNYAQKFQGRVTMTRDTSISTAYMELSRLRSDDTAVYYCARVEAVAGREYYYFSGMDVWGQGTTVTVSSGGGGSGGGGSGGGGSSYELTQPPSVSVSPGQTASITCSGEKLGDKYVYWYQQKPGQSPVLVIYQSTKRPSGVPERFSGSNSGNTATLTISGTQAMDEADYYCQAYHASTAVFGCGTKLTVLSGGGGSEVQLVESGGGLVQPGGSLKLSCAASGFTFNKYAMNWVRQAPGKGLEWVARIRSKYNNYATYYADSVKDRFTISRDDSKNTAYLQMNNLKTEDTAVYYCVRHGNFGNSYISYWAYWGQGTLVTVSSGGGGSGGGGSGGGGSQTVVTQEPSLTVSPGGTVTLTCGSSTGAVTSGNYPNWVQQKPGQAPRGLIGGTKFLAPGTPARFSGSLLGGKAALTLSGVQPEDEAEYYCVLWYSNRWVFGGGTKLTVL

SEQ ID NO: 3597 - protein, 1234 aa, Artificial Sequence
  Synthetic
EVQLLESGGGLVQPGGSLRLSCAASGFTFSSYWMHWVRQTPGKCLEWVSKIDPSDDYTNYNQKVKGRFTISIDKSKNTLYLQMNSLRAEDTAVYYCARWDYNYFDVWGQGTTVTVSSGGGGSGGGGSGGGGSEIVMTQSPATLSVSPGERATLTCRASSSVSYMHWYQQKPGQAPRLLIYGTSNLVSGVPARFSGSGSGTEFTLTISSLQSEDFAVYYCQQWSSYPLTFGCGTKVEIKSGGGGSQVQLVQSGAEVKKPGASVKVSCKASGYTFTGYYIHWVRQAPGQCLEWMGWINPNSGGTNYAQKFQGRVTMTRDTSISTAYMELSRLRSDDTAVYYCARVEAVAGREYYYFSGMDVWGQGTTVTVSSGGGGSGGGGSGGGGSSYELTQPPSVSVSPGQTASITCSGEKLGDKYVYWYQQKPGQSPVLVIYQSTKRPSGVPERFSGSNSGNTATLTISGTQAMDEADYYCQAYHASTAVFGCGTKLTVLSGGGGSEVQLVESGGGLVQPGGSLKLSCAASGFTFNKYAMNWVRQAPGKGLEWVARIRSKYNNYATYYADSVKDRFTISRDDSKNTAYLQMNNLKTEDTAVYYCVRHGNFGNSYISYWAYWGQGTLVTVSSGGGGSGGGGSGGGGSQTVVTQEPSLTVSPGGTVTLTCGSSTGAVTSGNYPNWVQQKPGQAPRGLIGGTKFLAPGTPARFSGSLLGGKAALTLSGVQPEDEAEYYCVLWYSNRWVFGGGTKLTVLGGGGDKTHTCPPCPAPELLGGPSVFLFPPKPKDTLMISRTPEVTCVVVDVSHEDPEVKFNWYVDGVEVHNAKTKPCEEQYGSTYRCVSVLTVLHQDWLNGKEYKCKVSNKALPAPIEKTISKAKGQPREPQVYTLPPSREEMTKNQVSLTCLVKGFYPSDIAVEWESNGQPENNYKTTPPVLDSDGSFFLYSKLTVDKSRWQQGNVFSCSVMHEALHNHYTQKSLSLSPGKGGGGSGGGGSGGGGSGGGGSGGGGSGGGGSDKTHTCPPCPAPELLGGPSVFLFPPKPKDTLMISRTPEVTCVVVDVSHEDPEVKFNWYVDGVEVHNAKTKPCEEQYGSTYRCVSVLTVLHQDWLNGKEYKCKVSNKALPAPIEKTISKAKGQPREPQVYTLPPSREEMTKNQVSLTCLVKGFYPSDIAVEWESNGQPENNYKTTPPVLDSDGSFFLYSKLTVDKSRWQQGNVFSCSVMHEALHNHYTQKSLSLSPGK

SEQ ID NO: 3598 - protein, 492 aa, Artificial Sequence
  Synthetic
EVQLLESGGGLVQPGGSLRLSCAASGFTFSSSWMNWVRQAPGKCLEWVGRIYMGDAETKYNDKVKGRFTISRDKSKNTVYLQMNSLRAEDTAVYYCAKQRDYGALYAMDYWGQGTLVTVSSGGGGSGGGGSGGGGSDIQLTQSPSFLSASVGDRVTITCRASDDIYSYLAWYQQKPGKAPKLLIYNSKTLAEGVPSRFSGSGSGTQFTLTISSLQPEDFATYYCQNHVYFPQTFGCGTKVDIKSGGGGSEVQLLESGGGVVQPGRSLRLSCAASGFTFSSYAMSWVRQAPGMCLEWVSAISGSGEGDYYANSVKGRFTISRDNSKNTLYLQMNSLRAEDTAVYYCAKVRNYYGSGSLDYWGQGTLVTVSSGGGGSGGGGSGGGGSEIVLTQSPGTLSLSPGERATLSCRASQSVSSTYLAWYQQKPGQAPRLLIYGASIRATGIPDRFSGSGSGTDFTLTISRLEPEDFAVYYCQQYGSSLTFGCGTKVEIK

SEQ ID NO: 3599 - protein, 747 aa, Artificial Sequence
  Synthetic
EVQLLESGGGLVQPGGSLRLSCAASGFTFSSSWMNWVRQAPGKCLEWVGRIYMGDAETKYNDKVKGRFTISRDKSKNTVYLQMNSLRAEDTAVYYCAKQRDYGALYAMDYWGQGTLVTVSSGGGGSGGGGSGGGGSDIQLTQSPSFLSASVGDRVTITCRASDDIYSYLAWYQQKPGKAPKLLIYNSKTLAEGVPSRFSGSGSGTQFTLTISSLQPEDFATYYCQNHVYFPQTFGCGTKVDIKSGGGGSEVQLLESGGGVVQPGRSLRLSCAASGFTFSSYAMSWVRQAPGMCLEWVSAISGSGEGDYYANSVKGRFTISRDNSKNTLYLQMNSLRAEDTAVYYCAKVRNYYGSGSLDYWGQGTLVTVSSGGGGSGGGGSGGGGSEIVLTQSPGTLSLSPGERATLSCRASQSVSSTYLAWYQQKPGQAPRLLIYGASIRATGIPDRFSGSGSGTDFTLTISRLEPEDFAVYYCQQYGSSLTFGCGTKVEIKSGGGGSEVQLVESGGGLVQPGGSLKLSCAASGFTFNKYAMNWVRQAPGKGLEWVARIRSKYNNYATYYADSVKDRFTISRDDSKNTAYLQMNNLKTEDTAVYYCVRHGNFGNSYISYWAYWGQGTLVTVSSGGGGSGGGGSGGGGSQTVVTQEPSLTVSPGGTVTLTCGSSTGAVTSGNYPNWVQQKPGQAPRGLIGGTKFLAPGTPARFSGSLLGGKAALTLSGVQPEDEAEYYCVLWYSNRWVFGGGTKLTVL

SEQ ID NO: 3600 - protein, 1235 aa, Artificial Sequence
  Synthetic
EVQLLESGGGLVQPGGSLRLSCAASGFTFSSSWMNWVRQAPGKCLEWVGRIYMGDAETKYNDKVKGRFTISRDKSKNTVYLQMNSLRAEDTAVYYCAKQRDYGALYAMDYWGQGTLVTVSSGGGGSGGGGSGGGGSDIQLTQSPSFLSASVGDRVTITCRASDDIYSYLAWYQQKPGKAPKLLIYNSKTLAEGVPSRFSGSGSGTQFTLTISSLQPEDFATYYCQNHVYFPQTFGCGTKVDIKSGGGGSEVQLLESGGGVVQPGRSLRLSCAASGFTFSSYAMSWVRQAPGMCLEWVSAISGSGEGDYYANSVKGRFTISRDNSKNTLYLQMNSLRAEDTAVYYCAKVRNYYGSGSLDYWGQGTLVTVSSGGGGSGGGGSGGGGSEIVLTQSPGTLSLSPGERATLSCRASQSVSSTYLAWYQQKPGQAPRLLIYGASIRATGIPDRFSGSGSGTDFTLTISRLEPEDFAVYYCQQYGSSLTFGCGTKVEIKSGGGGSEVQLVESGGGLVQPGGSLKLSCAASGFTFNKYAMNWVRQAPGKGLEWVARIRSKYNNYATYYADSVKDRFTISRDDSKNTAYLQMNNLKTEDTAVYYCVRHGNFGNSYISYWAYWGQGTLVTVSSGGGGSGGGGSGGGGSQTVVTQEPSLTVSPGGTVTLTCGSSTGAVTSGNYPNWVQQKPGQAPRGLIGGTKFLAPGTPARFSGSLLGGKAALTLSGVQPEDEAEYYCVLWYSNRWVFGGGTKLTVLGGGGDKTHTCPPCPAPELLGGPSVFLFPPKPKDTLMISRTPEVTCVVVDVSHEDPEVKFNWYVDGVEVHNAKTKPCEEQYGSTYRCVSVLTVLHQDWLNGKEYKCKVSNKALPAPIEKTISKAKGQPREPQVYTLPPSREEMTKNQVSLTCLVKGFYPSDIAVEWESNGQPENNYKTTPPVLDSDGSFFLYSKLTVDKSRWQQGNVFSCSVMHEALHNHYTQKSLSLSPGKGGGGSGGGGSGGGGSGGGGSGGGGSGGGGSDKTHTCPPCPAPELLGGPSVFLFPPKPKDTLMISRTPEVTCVVVDVSHEDPEVKFNWYVDGVEVHNAKTKPCEEQYGSTYRCVSVLTVLHQDWLNGKEYKCKVSNKALPAPIEKTISKAKGQPREPQVYTLPPSREEMTKNQVSLTCLVKGFYPSDIAVEWESNGQPENNYKTTPPVLDSDGSFFLYSKLTVDKSRWQQGNVFSCSVMHEALHNHYTQKSLSLSPGK

SEQ ID NO: 3601 - protein, 488 aa, Artificial Sequence
  Synthetic
QVQLVQSGAEVKKPGASVKVSCKASGYTFTSYWMHWVRQAPGQCLEWMGVIYTSGSYTIYNQKFQGRVTMTRDTSTSTAYMELSSLRSEDTAVYYCARSGPGYFDVWGQGTMVTVSSGGGGSGGGGSGGGGSDIQLTQSPSFLSASVGDRVTITCRASGNIHNYLAWYQQKPGKAPKLLIYNAKTLAEGVPSRFSGSGSGTEFTLKISSLQPEDFATYYCQHFAWTPYTFGCGTKLEIKSGGGGSQVQLQESGPGLVKPSETLSLTCTVSGGSISSSSYFWGWIRQPPGKCLEWIGNIYYSGSSNYNPSLKSRVTISVDTSKNQFSLKLSSVTAADTAVYYCARLPRGDRDAFDIWGQGTMVTVSSGGGGSGGGGSGGGGSDIVMTQSPSSLSASVGDRVTITCRASQGISNYLAWYQQKPGKVPKLLIYAASTLQSGVPSRFSGSGSGTDFTLTISSLQPEDFATYYCQQSYSTPFTFGCGTKVEIK

SEQ ID NO: 3602 - protein, 743 aa, Artificial Sequence
  Synthetic
QVQLVQSGAEVKKPGASVKVSCKASGYTFTSYWMHWVRQAPGQCLEWMGVIYTSGSYTIYNQKFQGRVTMTRDTSTSTAYMELSSLRSEDTAVYYCARSGPGYFDVWGQGTMVTVSSGGGGSGGGGSGGGGSDIQLTQSPSFLSASVGDRVTITCRASGNIHNYLAWYQQKPGKAPKLLIYNAKTLAEGVPSRFSGSGSGTEFTLKISSLQPEDFATYYCQHFAWTPYTFGCGTKLEIKSGGGGSQVQLQESGPGLVKPSETLSLTCTVSGGSISSSSYFWGWIRQPPGKCLEWIGNIYYSGSSNYNPSLKSRVTISVDTSKNQFSLKLSSVTAADTAVYYCARLPRGDRDAFDIWGQGTMVTVSSGGGGSGGGGSGGGGSDIVMTQSPSSLSASVGDRVTITCRASQGISNYLAWYQQKPGKVPKLLIYAASTLQSGVPSRFSGSGSGTDFTLTISSLQPEDFATYYCQQSYSTPFTFGCGTKVEIKSGGGGSEVQLVESGGGLVQPGGSLKLSCAASGFTFNKYAMNWVRQAPGKGLEWVARIRSKYNNYATYYADSVKDRFTISRDDSKNTAYLQMNNLKTEDTAVYYCVRHGNFGNSYISYWAYWGQGTLVTVSSGGGGSGGGGSGGGGSQTVVTQEPSLTVSPGGTVTLTCGSSTGAVTSGNYPNWVQQKPGQAPRGLIGGTKFLAPGTPARFSGSLLGGKAALTLSGVQPEDEAEYYCVLWYSNRWVFGGGTKLTVL

SEQ ID NO: 3603 - protein, 1231 aa, Artificial Sequence
  Synthetic
QVQLVQSGAEVKKPGASVKVSCKASGYTFTSYWMHWVRQAPGQCLEWMGVIYTSGSYTIYNQKFQGRVTMTRDTSTSTAYMELSSLRSEDTAVYYCARSGPGYFDVWGQGTMVTVSSGGGGSGGGGSGGGGSDIQLTQSPSFLSASVGDRVTITCRASGNIHNYLAWYQQKPGKAPKLLIYNAKTLAEGVPSRFSGSGSGTEFTLKISSLQPEDFATYYCQHFAWTPYTFGCGTKLEIKSGGGGSQVQLQESGPGLVKPSETLSLTCTVSGGSISSSSYFWGWIRQPPGKCLEWIGNIYYSGSSNYNPSLKSRVTISVDTSKNQFSLKLSSVTAADTAVYYCARLPRGDRDAFDIWGQGTMVTVSSGGGGSGGGGSGGGGSDIVMTQSPSSLSASVGDRVTITCRASQGISNYLAWYQQKPGKVPKLLIYAASTLQSGVPSRFSGSGSGTDFTLTISSLQPEDFATYYCQQSYSTPFTFGCGTKVEIKSGGGGSEVQLVESGGGLVQPGGSLKLSCAASGFTFNKYAMNWVRQAPGKGLEWVARIRSKYNNYATYYADSVKDRFTISRDDSKNTAYLQMNNLKTEDTAVYYCVRHGNFGNSYISYWAYWGQGTLVTVSSGGGGSGGGGSGGGGSQTVVTQEPSLTVSPGGTVTLTCGSSTGAVTSGNYPNWVQQKPGQAPRGLIGGTKFLAPGTPARFSGSLLGGKAALTLSGVQPEDEAEYYCVLWYSNRWVFGGGTKLTVLGGGGDKTHTCPPCPAPELLGGPSVFLFPPKPKDTLMISRTPEVTCVVVDVSHEDPEVKFNWYVDGVEVHNAKTKPCEEQYGSTYRCVSVLTVLHQDWLNGKEYKCKVSNKALPAPIEKTISKAKGQPREPQVYTLPPSREEMTKNQVSLTCLVKGFYPSDIAVEWESNGQPENNYKTTPPVLDSDGSFFLYSKLTVDKSRWQQGNVFSCSVMHEALHNHYTQKSLSLSPGKGGGGSGGGGSGGGGSGGGGSGGGGSGGGGSDKTHTCPPCPAPELLGGPSVFLFPPKPKDTLMISRTPEVTCVVVDVSHEDPEVKFNWYVDGVEVHNAKTKPCEEQYGSTYRCVSVLTVLHQDWLNGKEYKCKVSNKALPAPIEKTISKAKGQPREPQVYTLPPSREEMTKNQVSLTCLVKGFYPSDIAVEWESNGQPENNYKTTPPVLDSDGSFFLYSKLTVDKSRWQQGNVFSCSVMHEALHNHYTQKSLSLSPGK

SEQ ID NO: 3604 - protein, 488 aa, Artificial Sequence
  Synthetic
QVQLVQSGAEVKKPGASVKVSCKASGYTFTNYWMNWVRQAPGQCLEWMGNIAYGVKGTNYNQKFQGRVTMTVDTSSSTAYMELSRLRSDDTAVYYCATRYFYVMDYWGQGTLVTVSSGGGGSGGGGSGGGGSDIQMTQSPSSLSASVGDRVTITCRASQDISNYLNWYQQKPGKVPKLLIYYTSRLHSGVPSRFSGSGSGTDFTLTISSLQPEDVATYYCVQYAQFPLTFGCGTKVEIKSGGGGSEVQLLESGGGVVQPGRSLRLSCAASGFTFSSYAMSWVRQAPGMCLEWVSAISGSGEGDYYANSVKGRFTISRDNSKNTLYLQMNSLRAEDTAVYYCAKVRNYYGSGSLDYWGQGTLVTVSSGGGGSGGGGSGGGGSEIVLTQSPGTLSLSPGERATLSCRASQSVSSTYLAWYQQKPGQAPRLLIYGASIRATGIPDRFSGSGSGTDFTLTISRLEPEDFAVYYCQQYGSSLTFGCGTKVEIK

SEQ ID NO: 3605 - protein, 743 aa, Artificial Sequence
  Synthetic
QVQLVQSGAEVKKPGASVKVSCKASGYTFTNYWMNWVRQAPGQCLEWMGNIAYGVKGTNYNQKFQGRVTMTVDTSSSTAYMELSRLRSDDTAVYYCATRYFYVMDYWGQGTLVTVSSGGGGSGGGGSGGGGSDIQMTQSPSSLSASVGDRVTITCRASQDISNYLNWYQQKPGKVPKLLIYYTSRLHSGVPSRFSGSGSGTDFTLTISSLQPEDVATYYCVQYAQFPLTFGCGTKVEIKSGGGGSEVQLLESGGGVVQPGRSLRLSCAASGFTFSSYAMSWVRQAPGMCLEWVSAISGSGEGDYYANSVKGRFTISRDNSKNTLYLQMNSLRAEDTAVYYCAKVRNYYGSGSLDYWGQGTLVTVSSGGGGSGGGGSGGGGSEIVLTQSPGTLSLSPGERATLSCRASQSVSSTYLAWYQQKPGQAPRLLIYGASIRATGIPDRFSGSGSGTDFTLTISRLEPEDFAVYYCQQYGSSLTFGCGTKVEIKSGGGGSEVQLVESGGGLVQPGGSLKLSCAASGFTFNKYAMNWVRQAPGKGLEWVARIRSKYNNYATYYADSVKDRFTISRDDSKNTAYLQMNNLKTEDTAVYYCVRHGNFGNSYISYWAYWGQGTLVTVSSGGGGSGGGGSGGGGSQTVVTQEPSLTVSPGGTVTLTCGSSTGAVTSGNYPNWVQQKPGQAPRGLIGGTKFLAPGTPARFSGSLLGGKAALTLSGVQPEDEAEYYCVLWYSNRWVFGGGTKLTVL

SEQ ID NO: 3606 - protein, 1231 aa, Artificial Sequence
  Synthetic
QVQLVQSGAEVKKPGASVKVSCKASGYTFTNYWMNWVRQAPGQCLEWMGNIAYGVKGTNYNQKFQGRVTMTVDTSSSTAYMELSRLRSDDTAVYYCATRYFYVMDYWGQGTLVTVSSGGGGSGGGGSGGGGSDIQMTQSPSSLSASVGDRVTITCRASQDISNYLNWYQQKPGKVPKLLIYYTSRLHSGVPSRFSGSGSGTDFTLTISSLQPEDVATYYCVQYAQFPLTFGCGTKVEIKSGGGGSEVQLLESGGGVVQPGRSLRLSCAASGFTFSSYAMSWVRQAPGMCLEWVSAISGSGEGDYYANSVKGRFTISRDNSKNTLYLQMNSLRAEDTAVYYCAKVRNYYGSGSLDYWGQGTLVTVSSGGGGSGGGGSGGGGSEIVLTQSPGTLSLSPGERATLSCRASQSVSSTYLAWYQQKPGQAPRLLIYGASIRATGIPDRFSGSGSGTDFTLTISRLEPEDFAVYYCQQYGSSLTFGCGTKVEIKSGGGGSEVQLVESGGGLVQPGGSLKLSCAASGFTFNKYAMNWVRQAPGKGLEWVARIRSKYNNYATYYADSVKDRFTISRDDSKNTAYLQMNNLKTEDTAVYYCVRHGNFGNSYISYWAYWGQGTLVTVSSGGGGSGGGGSGGGGSQTVVTQEPSLTVSPGGTVTLTCGSSTGAVTSGNYPNWVQQKPGQAPRGLIGGTKFLAPGTPARFSGSLLGGKAALTLSGVQPEDEAEYYCVLWYSNRWVFGGGTKLTVLGGGGDKTHTCPPCPAPELLGGPSVFLFPPKPKDTLMISRTPEVTCVVVDVSHEDPEVKFNWYVDGVEVHNAKTKPCEEQYGSTYRCVSVLTVLHQDWLNGKEYKCKVSNKALPAPIEKTISKAKGQPREPQVYTLPPSREEMTKNQVSLTCLVKGFYPSDIAVEWESNGQPENNYKTTPPVLDSDGSFFLYSKLTVDKSRWQQGNVFSCSVMHEALHNHYTQKSLSLSPGKGGGGSGGGGSGGGGSGGGGSGGGGSGGGGSDKTHTCPPCPAPELLGGPSVFLFPPKPKDTLMISRTPEVTCVVVDVSHEDPEVKFNWYVDGVEVHNAKTKPCEEQYGSTYRCVSVLTVLHQDWLNGKEYKCKVSNKALPAPIEKTISKAKGQPREPQVYTLPPSREEMTKNQVSLTCLVKGFYPSDIAVEWESNGQPENNYKTTPPVLDSDGSFFLYSKLTVDKSRWQQGNVFSCSVMHEALHNHYTQKSLSLSPGK

SEQ ID NO: 3607 - protein, 492 aa, Artificial Sequence
  Synthetic
QVQLVQSGAEVVKPGASVKVSCKASGYTFTSSWMNWVRQAPGQCLEWMGRIYTGTGETKYSGKFQGRVTITRDTSASTAYMELSSLTSEDTAVYYCARQRDYGALYAMDYWGQGTLVTVSSGGGGSGGGGSGGGGSDIQLTQSPSFLSASVGDRVTITCRASDDIYSYLAWYQQKPGKAPKLLVYNAKTLAEGVPSRFSGSGSGTEFTLTISSLQPEDFATYYCQNHDRTPFTFGCGTKVDIKSGGGGSEVQLLESGGGVVQPGRSLRLSCAASGFTFSSYAMSWVRQAPGKCLEWVSAISGSGEQWYYAPSVKGRFTISRDNSKNTLYLQMNSLRAEDTAVYYCAKVRNYYGSGSLDYWGQGTLVTVSSGGGGSGGGGSGGGGSEIVLTQSPGTLSLSPGERATLSCRASQSFSSAYLAWYQQKPGQAPRLLIYGASIRATGIPDRFSGSGSGTDFTLTISRLEPEDFAVYYCQQYGSSLTFGCGTKVEIK

SEQ ID NO: 3608 - protein, 747 aa, Artificial Sequence
  Synthetic
QVQLVQSGAEVVKPGASVKVSCKASGYTFTSSWMNWVRQAPGQCLEWMGRIYTGTGETKYSGKFQGRVTITRDTSASTAYMELSSLTSEDTAVYYCARQRDYGALYAMDYWGQGTLVTVSSGGGGSGGGGSGGGGSDIQLTQSPSFLSASVGDRVTITCRASDDIYSYLAWYQQKPGKAPKLLVYNAKTLAEGVPSRFSGSGSGTEFTLTISSLQPEDFATYYCQNHDRTPFTFGCGTKVDIKSGGGGSEVQLLESGGGVVQPGRSLRLSCAASGFTFSSYAMSWVRQAPGKCLEWVSAISGSGEQWYYAPSVKGRFTISRDNSKNTLYLQMNSLRAEDTAVYYCAKVRNYYGSGSLDYWGQGTLVTVSSGGGGSGGGGSGGGGSEIVLTQSPGTLSLSPGERATLSCRASQSFSSAYLAWYQQKPGQAPRLLIYGASIRATGIPDRFSGSGSGTDFTLTISRLEPEDFAVYYCQQYGSSLTFGCGTKVEIKSGGGGSEVQLVESGGGLVQPGGSLKLSCAASGFTFNKYAMNWVRQAPGKGLEWVARIRSKYNNYATYYADSVKDRFTISRDDSKNTAYLQMNNLKTEDTAVYYCVRHGNFGNSYISYWAYWGQGTLVTVSSGGGGSGGGGSGGGGSQTVVTQEPSLTVSPGGTVTLTCGSSTGAVTSGNYPNWVQQKPGQAPRGLIGGTKFLAPGTPARFSGSLLGGKAALTLSGVQPEDEAEYYCVLWYSNRWVFGGGTKLTVL

SEQ ID NO: 3609 - protein, 1235 aa, Artificial Sequence
  Synthetic
QVQLVQSGAEVVKPGASVKVSCKASGYTFTSSWMNWVRQAPGQCLEWMGRIYTGTGETKYSGKFQGRVTITRDTSASTAYMELSSLTSEDTAVYYCARQRDYGALYAMDYWGQGTLVTVSSGGGGSGGGGSGGGGSDIQLTQSPSFLSASVGDRVTITCRASDDIYSYLAWYQQKPGKAPKLLVYNAKTLAEGVPSRFSGSGSGTEFTLTISSLQPEDFATYYCQNHDRTPFTFGCGTKVDIKSGGGGSEVQLLESGGGVVQPGRSLRLSCAASGFTFSSYAMSWVRQAPGKCLEWVSAISGSGEQWYYAPSVKGRFTISRDNSKNTLYLQMNSLRAEDTAVYYCAKVRNYYGSGSLDYWGQGTLVTVSSGGGGSGGGGSGGGGSEIVLTQSPGTLSLSPGERATLSCRASQSFSSAYLAWYQQKPGQAPRLLIYGASIRATGIPDRFSGSGSGTDFTLTISRLEPEDFAVYYCQQYGSSLTFGCGTKVEIKSGGGGSEVQLVESGGGLVQPGGSLKLSCAASGFTFNKYAMNWVRQAPGKGLEWVARIRSKYNNYATYYADSVKDRFTISRDDSKNTAYLQMNNLKTEDTAVYYCVRHGNFGNSYISYWAYWGQGTLVTVSSGGGGSGGGGSGGGGSQTVVTQEPSLTVSPGGTVTLTCGSSTGAVTSGNYPNWVQQKPGQAPRGLIGGTKFLAPGTPARFSGSLLGGKAALTLSGVQPEDEAEYYCVLWYSNRWVFGGGTKLTVLGGGGDKTHTCPPCPAPELLGGPSVFLFPPKPKDTLMISRTPEVTCVVVDVSHEDPEVKFNWYVDGVEVHNAKTKPCEEQYGSTYRCVSVLTVLHQDWLNGKEYKCKVSNKALPAPIEKTISKAKGQPREPQVYTLPPSREEMTKNQVSLTCLVKGFYPSDIAVEWESNGQPENNYKTTPPVLDSDGSFFLYSKLTVDKSRWQQGNVFSCSVMHEALHNHYTQKSLSLSPGKGGGGSGGGGSGGGGSGGGGSGGGGSGGGGSDKTHTCPPCPAPELLGGPSVFLFPPKPKDTLMISRTPEVTCVVVDVSHEDPEVKFNWYVDGVEVHNAKTKPCEEQYGSTYRCVSVLTVLHQDWLNGKEYKCKVSNKALPAPIEKTISKAKGQPREPQVYTLPPSREEMTKNQVSLTCLVKGFYPSDIAVEWESNGQPENNYKTTPPVLDSDGSFFLYSKLTVDKSRWQQGNVFSCSVMHEALHNHYTQKSLSLSPGK

SEQ ID NO: 3610 - protein, 492 aa, Artificial Sequence
  Synthetic
QVQLVQSGAEVVKPGASVKVSCKASGYTFTSSWMNWVRQAPGQCLEWMGRIYTGTGETKYSGKFQGRVTITRDTSASTAYMELSSLTSEDTAVYYCARQRDYGALYAMDYWGQGTLVTVSSGGGGSGGGGSGGGGSDIQLTQSPSFLSASVGDRVTITCRASDDIYSYLAWYQQKPGKAPKLLVYNAKTLAEGVPSRFSGSGSGTEFTLTISSLQPEDFATYYCQNHDRTPFTFGCGTKVDIKSGGGGSEVQLLESGGGVVQPGRSLRLSCAASGFTFSSYAMSWVRQAPGKCLEWVSAISGSGEFSYYAAAVKGRFTISRDNSKNTLYLQMNSLRAEDTAVYYCAKVRNYYGSGSLDYWGQGTLVTVSSGGGGSGGGGSGGGGSEIVLTQSPGTLSLSPGERATLSCRASQSVSSTYLAWYQQKPGQAPRLLIYGASIRATGIPDRFSGSGSGTDFTLTISRLEPEDFAVYYCQQYQSSLTFGCGTKVEIK

SEQ ID NO: 3611 - protein, 747 aa, Artificial Sequence
  Synthetic
QVQLVQSGAEVVKPGASVKVSCKASGYTFTSSWMNWVRQAPGQCLEWMGRIYTGTGETKYSGKFQGRVTITRDTSASTAYMELSSLTSEDTAVYYCARQRDYGALYAMDYWGQGTLVTVSSGGGGSGGGGSGGGGSDIQLTQSPSFLSASVGDRVTITCRASDDIYSYLAWYQQKPGKAPKLLVYNAKTLAEGVPSRFSGSGSGTEFTLTISSLQPEDFATYYCQNHDRTPFTFGCGTKVDIKSGGGGSEVQLLESGGGVVQPGRSLRLSCAASGFTFSSYAMSWVRQAPGKCLEWVSAISGSGEFSYYAAAVKGRFTISRDNSKNTLYLQMNSLRAEDTAVYYCAKVRNYYGSGSLDYWGQGTLVTVSSGGGGSGGGGSGGGGSEIVLTQSPGTLSLSPGERATLSCRASQSVSSTYLAWYQQKPGQAPRLLIYGASIRATGIPDRFSGSGSGTDFTLTISRLEPEDFAVYYCQQYQSSLTFGCGTKVEIKSGGGGSEVQLVESGGGLVQPGGSLKLSCAASGFTFNKYAMNWVRQAPGKGLEWVARIRSKYNNYATYYADSVKDRFTISRDDSKNTAYLQMNNLKTEDTAVYYCVRHGNFGNSYISYWAYWGQGTLVTVSSGGGGSGGGGSGGGGSQTVVTQEPSLTVSPGGTVTLTCGSSTGAVTSGNYPNWVQQKPGQAPRGLIGGTKFLAPGTPARFSGSLLGGKAALTLSGVQPEDEAEYYCVLWYSNRWVFGGGTKLTVL

SEQ ID NO: 3612 - protein, 1235 aa, Artificial Sequence
  Synthetic
QVQLVQSGAEVVKPGASVKVSCKASGYTFTSSWMNWVRQAPGQCLEWMGRIYTGTGETKYSGKFQGRVTITRDTSASTAYMELSSLTSEDTAVYYCARQRDYGALYAMDYWGQGTLVTVSSGGGGSGGGGSGGGGSDIQLTQSPSFLSASVGDRVTITCRASDDIYSYLAWYQQKPGKAPKLLVYNAKTLAEGVPSRFSGSGSGTEFTLTISSLQPEDFATYYCQNHDRTPFTFGCGTKVDIKSGGGGSEVQLLESGGGVVQPGRSLRLSCAASGFTFSSYAMSWVRQAPGKCLEWVSAISGSGEFSYYAAAVKGRFTISRDNSKNTLYLQMNSLRAEDTAVYYCAKVRNYYGSGSLDYWGQGTLVTVSSGGGGSGGGGSGGGGSEIVLTQSPGTLSLSPGERATLSCRASQSVSSTYLAWYQQKPGQAPRLLIYGASIRATGIPDRFSGSGSGTDFTLTISRLEPEDFAVYYCQQYQSSLTFGCGTKVEIKSGGGGSEVQLVESGGGLVQPGGSLKLSCAASGFTFNKYAMNWVRQAPGKGLEWVARIRSKYNNYATYYADSVKDRFTISRDDSKNTAYLQMNNLKTEDTAVYYCVRHGNFGNSYISYWAYWGQGTLVTVSSGGGGSGGGGSGGGGSQTVVTQEPSLTVSPGGTVTLTCGSSTGAVTSGNYPNWVQQKPGQAPRGLIGGTKFLAPGTPARFSGSLLGGKAALTLSGVQPEDEAEYYCVLWYSNRWVFGGGTKLTVLGGGGDKTHTCPPCPAPELLGGPSVFLFPPKPKDTLMISRTPEVTCVVVDVSHEDPEVKFNWYVDGVEVHNAKTKPCEEQYGSTYRCVSVLTVLHQDWLNGKEYKCKVSNKALPAPIEKTISKAKGQPREPQVYTLPPSREEMTKNQVSLTCLVKGFYPSDIAVEWESNGQPENNYKTTPPVLDSDGSFFLYSKLTVDKSRWQQGNVFSCSVMHEALHNHYTQKSLSLSPGKGGGGSGGGGSGGGGSGGGGSGGGGSGGGGSDKTHTCPPCPAPELLGGPSVFLFPPKPKDTLMISRTPEVTCVVVDVSHEDPEVKFNWYVDGVEVHNAKTKPCEEQYGSTYRCVSVLTVLHQDWLNGKEYKCKVSNKALPAPIEKTISKAKGQPREPQVYTLPPSREEMTKNQVSLTCLVKGFYPSDIAVEWESNGQPENNYKTTPPVLDSDGSFFLYSKLTVDKSRWQQGNVFSCSVMHEALHNHYTQKSLSLSPGK

SEQ ID NO: 3613 - protein, 488 aa, Artificial Sequence
  Synthetic
QVQLVQSGAEVKKPGASVKVSCKASGYTFTNYWMNWVRQAPGQCLEWMGNIHSKAHGTNYNQKFQGRVTMTVDTSSSTAYMELSRLRSDDTAVYYCATRYFYVMDYWGQGTLVTVSSGGGGSGGGGSGGGGSDIQMTQSPSSLSASVGDRVTITCRASQDISNYLNWYQQKPGKVPKLLIYYTSRLHSGVPSRFSGSGSGTDFTLTISSLQPEDVATYYCVQYAQFPLTFGCGTKVEIKSGGGGSQVQLQESGPGLVKPSETLSLTCTVSGGSISSSSYFWGWIRQPPGKCLEWIGNIYYSGSSNYNPSLKSRVTISVDTSKNQFSLKLSSVTAADTAVYYCARLPRGDRDAFDIWGQGTMVTVSSGGGGSGGGGSGGGGSDIVMTQSPSSLSASVGDRVTITCRASQGISNYLAWYQQKPGKVPKLLIYAASTLQSGVPSRFSGSGSGTDFTLTISSLQPEDFATYYCQQSYSTPFTFGCGTKVEIK

SEQ ID NO: 3614 - protein, 743 aa, Artificial Sequence
  Synthetic
QVQLVQSGAEVKKPGASVKVSCKASGYTFTNYWMNWVRQAPGQCLEWMGNIHSKAHGTNYNQKFQGRVTMTVDTSSSTAYMELSRLRSDDTAVYYCATRYFYVMDYWGQGTLVTVSSGGGGSGGGGSGGGGSDIQMTQSPSSLSASVGDRVTITCRASQDISNYLNWYQQKPGKVPKLLIYYTSRLHSGVPSRFSGSGSGTDFTLTISSLQPEDVATYYCVQYAQFPLTFGCGTKVEIKSGGGGSQVQLQESGPGLVKPSETLSLTCTVSGGSISSSSYFWGWIRQPPGKCLEWIGNIYYSGSSNYNPSLKSRVTISVDTSKNQFSLKLSSVTAADTAVYYCARLPRGDRDAFDIWGQGTMVTVSSGGGGSGGGGSGGGGSDIVMTQSPSSLSASVGDRVTITCRASQGISNYLAWYQQKPGKVPKLLIYAASTLQSGVPSRFSGSGSGTDFTLTISSLQPEDFATYYCQQSYSTPFTFGCGTKVEIKSGGGGSEVQLVESGGGLVQPGGSLKLSCAASGFTFNKYAMNWVRQAPGKGLEWVARIRSKYNNYATYYADSVKDRFTISRDDSKNTAYLQMNNLKTEDTAVYYCVRHGNFGNSYISYWAYWGQGTLVTVSSGGGGSGGGGSGGGGSQTVVTQEPSLTVSPGGTVTLTCGSSTGAVTSGNYPNWVQQKPGQAPRGLIGGTKFLAPGTPARFSGSLLGGKAALTLSGVQPEDEAEYYCVLWYSNRWVFGGGTKLTVL

SEQ ID NO: 3615 - protein, 1231 aa, Artificial Sequence
  Synthetic
QVQLVQSGAEVKKPGASVKVSCKASGYTFTNYWMNWVRQAPGQCLEWMGNIHSKAHGTNYNQKFQGRVTMTVDTSSSTAYMELSRLRSDDTAVYYCATRYFYVMDYWGQGTLVTVSSGGGGSGGGGSGGGGSDIQMTQSPSSLSASVGDRVTITCRASQDISNYLNWYQQKPGKVPKLLIYYTSRLHSGVPSRFSGSGSGTDFTLTISSLQPEDVATYYCVQYAQFPLTFGCGTKVEIKSGGGGSQVQLQESGPGLVKPSETLSLTCTVSGGSISSSSYFWGWIRQPPGKCLEWIGNIYYSGSSNYNPSLKSRVTISVDTSKNQFSLKLSSVTAADTAVYYCARLPRGDRDAFDIWGQGTMVTVSSGGGGSGGGGSGGGGSDIVMTQSPSSLSASVGDRVTITCRASQGISNYLAWYQQKPGKVPKLLIYAASTLQSGVPSRFSGSGSGTDFTLTISSLQPEDFATYYCQQSYSTPFTFGCGTKVEIKSGGGGSEVQLVESGGGLVQPGGSLKLSCAASGFTFNKYAMNWVRQAPGKGLEWVARIRSKYNNYATYYADSVKDRFTISRDDSKNTAYLQMNNLKTEDTAVYYCVRHGNFGNSYISYWAYWGQGTLVTVSSGGGGSGGGGSGGGGSQTVVTQEPSLTVSPGGTVTLTCGSSTGAVTSGNYPNWVQQKPGQAPRGLIGGTKFLAPGTPARFSGSLLGGKAALTLSGVQPEDEAEYYCVLWYSNRWVFGGGTKLTVLGGGGDKTHTCPPCPAPELLGGPSVFLFPPKPKDTLMISRTPEVTCVVVDVSHEDPEVKFNWYVDGVEVHNAKTKPCEEQYGSTYRCVSVLTVLHQDWLNGKEYKCKVSNKALPAPIEKTISKAKGQPREPQVYTLPPSREEMTKNQVSLTCLVKGFYPSDIAVEWESNGQPENNYKTTPPVLDSDGSFFLYSKLTVDKSRWQQGNVFSCSVMHEALHNHYTQKSLSLSPGKGGGGSGGGGSGGGGSGGGGSGGGGSGGGGSDKTHTCPPCPAPELLGGPSVFLFPPKPKDTLMISRTPEVTCVVVDVSHEDPEVKFNWYVDGVEVHNAKTKPCEEQYGSTYRCVSVLTVLHQDWLNGKEYKCKVSNKALPAPIEKTISKAKGQPREPQVYTLPPSREEMTKNQVSLTCLVKGFYPSDIAVEWESNGQPENNYKTTPPVLDSDGSFFLYSKLTVDKSRWQQGNVFSCSVMHEALHNHYTQKSLSLSPGK

SEQ ID NO: 3616 - protein, 492 aa, Artificial Sequence
  Synthetic
QVQLVQSGAEVKKPGASVKVSCKASGYTFTNYWMNWVRQAPGQCLEWMGNIHSKAHGTNYNQKFQGRVTMTVDTSSSTAYMELSRLRSDDTAVYYCATRYFYVMDYWGQGTLVTVSSGGGGSGGGGSGGGGSDIQMTQSPSSLSASVGDRVTITCRASQDISNYLNWYQQKPGKVPKLLIYYTSRLHSGVPSRFSGSGSGTDFTLTISSLQPEDVATYYCVQYAQFPLTFGCGTKVEIKSGGGGSQVQLVQSGAEVKKPGASVKVSCKASGYTFTGYYIHWVRQAPGQCLEWMGWINPNSGGTNYAQKFQGRVTMTRDTSISTAYMELSRLRSDDTAVYYCARVEAVAGREYYYFSGMDVWGQGTTVTVSSGGGGSGGGGSGGGGSSYELTQPPSVSVSPGQTASITCSGEKLGDKYVYWYQQKPGQSPVLVIYQSTKRPSGVPERFSGSNSGNTATLTISGTQAMDEADYYCQAYHASTAVFGCGTKLTVL

SEQ ID NO: 3617 - protein, 747 aa, Artificial Sequence
  Synthetic
QVQLVQSGAEVKKPGASVKVSCKASGYTFTNYWMNWVRQAPGQCLEWMGNIHSKAHGTNYNQKFQGRVTMTVDTSSSTAYMELSRLRSDDTAVYYCATRYFYVMDYWGQGTLVTVSSGGGGSGGGGSGGGGSDIQMTQSPSSLSASVGDRVTITCRASQDISNYLNWYQQKPGKVPKLLIYYTSRLHSGVPSRFSGSGSGTDFTLTISSLQPEDVATYYCVQYAQFPLTFGCGTKVEIKSGGGGSQVQLVQSGAEVKKPGASVKVSCKASGYTFTGYYIHWVRQAPGQCLEWMGWINPNSGGTNYAQKFQGRVTMTRDTSISTAYMELSRLRSDDTAVYYCARVEAVAGREYYYFSGMDVWGQGTTVTVSSGGGGSGGGGSGGGGSSYELTQPPSVSVSPGQTASITCSGEKLGDKYVYWYQQKPGQSPVLVIYQSTKRPSGVPERFSGSNSGNTATLTISGTQAMDEADYYCQAYHASTAVFGCGTKLTVLSGGGGSEVQLVESGGGLVQPGGSLKLSCAASGFTFNKYAMNWVRQAPGKGLEWVARIRSKYNNYATYYADSVKDRFTISRDDSKNTAYLQMNNLKTEDTAVYYCVRHGNFGNSYISYWAYWGQGTLVTVSSGGGGSGGGGSGGGGSQTVVTQEPSLTVSPGGTVTLTCGSSTGAVTSGNYPNWVQQKPGQAPRGLIGGTKFLAPGTPARFSGSLLGGKAALTLSGVQPEDEAEYYCVLWYSNRWVFGGGTKLTVL

SEQ ID NO: 3618 - protein, 1235 aa, Artificial Sequence
  Synthetic
QVQLVQSGAEVKKPGASVKVSCKASGYTFTNYWMNWVRQAPGQCLEWMGNIHSKAHGTNYNQKFQGRVTMTVDTSSSTAYMELSRLRSDDTAVYYCATRYFYVMDYWGQGTLVTVSSGGGGSGGGGSGGGGSDIQMTQSPSSLSASVGDRVTITCRASQDISNYLNWYQQKPGKVPKLLIYYTSRLHSGVPSRFSGSGSGTDFTLTISSLQPEDVATYYCVQYAQFPLTFGCGTKVEIKSGGGGSQVQLVQSGAEVKKPGASVKVSCKASGYTFTGYYIHWVRQAPGQCLEWMGWINPNSGGTNYAQKFQGRVTMTRDTSISTAYMELSRLRSDDTAVYYCARVEAVAGREYYYFSGMDVWGQGTTVTVSSGGGGSGGGGSGGGGSSYELTQPPSVSVSPGQTASITCSGEKLGDKYVYWYQQKPGQSPVLVIYQSTKRPSGVPERFSGSNSGNTATLTISGTQAMDEADYYCQAYHASTAVFGCGTKLTVLSGGGGSEVQLVESGGGLVQPGGSLKLSCAASGFTFNKYAMNWVRQAPGKGLEWVARIRSKYNNYATYYADSVKDRFTISRDDSKNTAYLQMNNLKTEDTAVYYCVRHGNFGNSYISYWAYWGQGTLVTVSSGGGGSGGGGSGGGGSQTVVTQEPSLTVSPGGTVTLTCGSSTGAVTSGNYPNWVQQKPGQAPRGLIGGTKFLAPGTPARFSGSLLGGKAALTLSGVQPEDEAEYYCVLWYSNRWVFGGGTKLTVLGGGGDKTHTCPPCPAPELLGGPSVFLFPPKPKDTLMISRTPEVTCVVVDVSHEDPEVKFNWYVDGVEVHNAKTKPCEEQYGSTYRCVSVLTVLHQDWLNGKEYKCKVSNKALPAPIEKTISKAKGQPREPQVYTLPPSREEMTKNQVSLTCLVKGFYPSDIAVEWESNGQPENNYKTTPPVLDSDGSFFLYSKLTVDKSRWQQGNVFSCSVMHEALHNHYTQKSLSLSPGKGGGGSGGGGSGGGGSGGGGSGGGGSGGGGSDKTHTCPPCPAPELLGGPSVFLFPPKPKDTLMISRTPEVTCVVVDVSHEDPEVKFNWYVDGVEVHNAKTKPCEEQYGSTYRCVSVLTVLHQDWLNGKEYKCKVSNKALPAPIEKTISKAKGQPREPQVYTLPPSREEMTKNQVSLTCLVKGFYPSDIAVEWESNGQPENNYKTTPPVLDSDGSFFLYSKLTVDKSRWQQGNVFSCSVMHEALHNHYTQKSLSLSPGK

SEQ ID NO: 3619 - protein, 483 aa, Artificial Sequence
  Synthetic
QVQLVQSGAEVKKPGASVKVSCKASGYTFTSYWMHWVRQAPGQCLEWMGVIRTSTSYTIYNQKFKGRVTMTRDTSTSTVYMELSSLRSEDTAVYYCARSGPGYFDVWGQGTMVTVSSGGGGSGGGGSGGGGSDIQLTQSPSFLSASVGDRVTITCRASENIYSYLAWYQQKPGKAPKLLIYNAKTLAEGVPSRFSGSGSGTEFTLTISSLQPEDFATYYCQHNYGTPYTFGCGTKLEIKSGGGGSQVQLVESGGGLVKPGGSLRLSCAASGFTFSDYYMTWIRQAPGKCLEWLSYISSSGSTIYYAEAVKGRFTISRDNAKNSLFLQMNSLRAEDTAVYYCARDRNSHFDYWGQGTLVTVSSGGGGSGGGGSGGGGSDIMTQSPSSVSASVGDRVTITCRASQGIRTWLAWYQQKPGKAPKLLIYGASGLQSGVPSRFSGSGSGTDFTLTISSLQPEDFATYYCQQAESFPRTFGCGTKVEIK

SEQ ID NO: 3620 - protein, 738 aa, Artificial Sequence
  Synthetic
QVQLVQSGAEVKKPGASVKVSCKASGYTFTSYWMHWVRQAPGQCLEWMGVIRTSTSYTIYNQKFKGRVTMTRDTSTSTVYMELSSLRSEDTAVYYCARSGPGYFDVWGQGTMVTVSSGGGGSGGGGSGGGGSDIQLTQSPSFLSASVGDRVTITCRASENIYSYLAWYQQKPGKAPKLLIYNAKTLAEGVPSRFSGSGSGTEFTLTISSLQPEDFATYYCQHNYGTPYTFGCGTKLEIKSGGGGSQVQLVESGGGLVKPGGSLRLSCAASGFTFSDYYMTWIRQAPGKCLEWLSYISSSGSTIYYAEAVKGRFTISRDNAKNSLFLQMNSLRAEDTAVYYCARDRNSHFDYWGQGTLVTVSSGGGGSGGGGSGGGGSDIMTQSPSSVSASVGDRVTITCRASQGIRTWLAWYQQKPGKAPKLLIYGASGLQSGVPSRFSGSGSGTDFTLTISSLQPEDFATYYCQQAESFPRTFGCGTKVEIKSGGGGSEVQLVESGGGLVQPGGSLKLSCAASGFTFNKYAMNWVRQAPGKGLEWVARIRSKYNNYATYYADSVKDRFTISRDDSKNTAYLQMNNLKTEDTAVYYCVRHGNFGNSYISYWAYWGQGTLVTVSSGGGGSGGGGSGGGGSQTVVTQEPSLTVSPGGTVTLTCGSSTGAVTSGNYPNWVQQKPGQAPRGLIGGTKFLAPGTPARFSGSLLGGKAALTLSGVQPEDEAEYYCVLWYSNRWVFGGGTKLTVL

SEQ ID NO: 3621 - protein, 1226 aa, Artificial Sequence
  Synthetic
QVQLVQSGAEVKKPGASVKVSCKASGYTFTSYWMHWVRQAPGQCLEWMGVIRTSTSYTIYNQKFKGRVTMTRDTSTSTVYMELSSLRSEDTAVYYCARSGPGYFDVWGQGTMVTVSSGGGGSGGGGSGGGGSDIQLTQSPSFLSASVGDRVTITCRASENIYSYLAWYQQKPGKAPKLLIYNAKTLAEGVPSRFSGSGSGTEFTLTISSLQPEDFATYYCQHNYGTPYTFGCGTKLEIKSGGGGSQVQLVESGGGLVKPGGSLRLSCAASGFTFSDYYMTWIRQAPGKCLEWLSYISSSGSTIYYAEAVKGRFTISRDNAKNSLFLQMNSLRAEDTAVYYCARDRNSHFDYWGQGTLVTVSSGGGGSGGGGSGGGGSDIMTQSPSSVSASVGDRVTITCRASQGIRTWLAWYQQKPGKAPKLLIYGASGLQSGVPSRFSGSGSGTDFTLTISSLQPEDFATYYCQQAESFPRTFGCGTKVEIKSGGGGSEVQLVESGGGLVQPGGSLKLSCAASGFTFNKYAMNWVRQAPGKGLEWVARIRSKYNNYATYYADSVKDRFTISRDDSKNTAYLQMNNLKTEDTAVYYCVRHGNFGNSYISYWAYWGQGTLVTVSSGGGGSGGGGSGGGGSQTVVTQEPSLTVSPGGTVTLTCGSSTGAVTSGNYPNWVQQKPGQAPRGLIGGTKFLAPGTPARFSGSLLGGKAALTLSGVQPEDEAEYYCVLWYSNRWVFGGGTKLTVLGGGGDKTHTCPPCPAPELLGGPSVFLFPPKPKDTLMISRTPEVTCVVVDVSHEDPEVKFNWYVDGVEVHNAKTKPCEEQYGSTYRCVSVLTVLHQDWLNGKEYKCKVSNKALPAPIEKTISKAKGQPREPQVYTLPPSREEMTKNQVSLTCLVKGFYPSDIAVEWESNGQPENNYKTTPPVLDSDGSFFLYSKLTVDKSRWQQGNVFSCSVMHEALHNHYTQKSLSLSPGKGGGGSGGGGSGGGGSGGGGSGGGGSGGGGSDKTHTCPPCPAPELLGGPSVFLFPPKPKDTLMISRTPEVTCVVVDVSHEDPEVKFNWYVDGVEVHNAKTKPCEEQYGSTYRCVSVLTVLHQDWLNGKEYKCKVSNKALPAPIEKTISKAKGQPREPQVYTLPPSREEMTKNQVSLTCLVKGFYPSDIAVEWESNGQPENNYKTTPPVLDSDGSFFLYSKLTVDKSRWQQGNVFSCSVMHEALHNHYTQKSLSLSPGK

SEQ ID NO: 3622 - protein, 491 aa, Artificial Sequence
  Synthetic
EVQLLESGGGLVQPGGSVRLSCAASGFTFSSYWMYWVRQAPGKCLEWVSKIDPSDDYTNYNQKVKGRFTISIDNSKNTLYLQMNSLRAEDSAVYYCARWDYTHFDVWGQGTTVTVSSGGGGSGGGGSGGGGSEIVMTQSPATLSVSPGERATLSCRASSSVSYMHWYQQKPGQAPRLLIYGTSNLASGVPVRFSGSGSGTEFTLTISRLQSEDVAVYYCQQWSSYPLTFGCGTKVEIKSGGGGSQVQLVQSGAEVKKPGASVKVSCKASGYTFTGYYIHWVRQAPGQCLEWMGWINPNSGGTNYAQKFQGRVTMTRDTSISTAYMELSRLRSDDTAVYYCARVEAVAGREYYYFSGMDVWGQGTTVTVSSGGGGSGGGGSGGGGSSYELTQPPSVSVSPGQTASITCSGEKLGDKYVYWYQQKPGQSPVLVIYQSTKRPSGVPERFSGSNSGNTATLTISGTQAMDEADYYCQAYHASTAVFGCGTKLTVL

SEQ ID NO: 3623 - protein, 746 aa, Artificial Sequence
  Synthetic
EVQLLESGGGLVQPGGSVRLSCAASGFTFSSYWMYWVRQAPGKCLEWVSKIDPSDDYTNYNQKVKGRFTISIDNSKNTLYLQMNSLRAEDSAVYYCARWDYTHFDVWGQGTTVTVSSGGGGSGGGGSGGGGSEIVMTQSPATLSVSPGERATLSCRASSSVSYMHWYQQKPGQAPRLLIYGTSNLASGVPVRFSGSGSGTEFTLTISRLQSEDVAVYYCQQWSSYPLTFGCGTKVEIKSGGGGSQVQLVQSGAEVKKPGASVKVSCKASGYTFTGYYIHWVRQAPGQCLEWMGWINPNSGGTNYAQKFQGRVTMTRDTSISTAYMELSRLRSDDTAVYYCARVEAVAGREYYYFSGMDVWGQGTTVTVSSGGGGSGGGGSGGGGSSYELTQPPSVSVSPGQTASITCSGEKLGDKYVYWYQQKPGQSPVLVIYQSTKRPSGVPERFSGSNSGNTATLTISGTQAMDEADYYCQAYHASTAVFGCGTKLTVLSGGGGSEVQLVESGGGLVQPGGSLKLSCAASGFTFNKYAMNWVRQAPGKGLEWVARIRSKYNNYATYYADSVKDRFTISRDDSKNTAYLQMNNLKTEDTAVYYCVRHGNFGNSYISYWAYWGQGTLVTVSSGGGGSGGGGSGGGGSQTVVTQEPSLTVSPGGTVTLTCGSSTGAVTSGNYPNWVQQKPGQAPRGLIGGTKFLAPGTPARFSGSLLGGKAALTLSGVQPEDEAEYYCVLWYSNRWVFGGGTKLTVL

SEQ ID NO: 3624 - protein, 1234 aa, Artificial Sequence
  Synthetic
EVQLLESGGGLVQPGGSVRLSCAASGFTFSSYWMYWVRQAPGKCLEWVSKIDPSDDYTNYNQKVKGRFTISIDNSKNTLYLQMNSLRAEDSAVYYCARWDYTHFDVWGQGTTVTVSSGGGGSGGGGSGGGGSEIVMTQSPATLSVSPGERATLSCRASSSVSYMHWYQQKPGQAPRLLIYGTSNLASGVPVRFSGSGSGTEFTLTISRLQSEDVAVYYCQQWSSYPLTFGCGTKVEIKSGGGGSQVQLVQSGAEVKKPGASVKVSCKASGYTFTGYYIHWVRQAPGQCLEWMGWINPNSGGTNYAQKFQGRVTMTRDTSISTAYMELSRLRSDDTAVYYCARVEAVAGREYYYFSGMDVWGQGTTVTVSSGGGGSGGGGSGGGGSSYELTQPPSVSVSPGQTASITCSGEKLGDKYVYWYQQKPGQSPVLVIYQSTKRPSGVPERFSGSNSGNTATLTISGTQAMDEADYYCQAYHASTAVFGCGTKLTVLSGGGGSEVQLVESGGGLVQPGGSLKLSCAASGFTFNKYAMNWVRQAPGKGLEWVARIRSKYNNYATYYADSVKDRFTISRDDSKNTAYLQMNNLKTEDTAVYYCVRHGNFGNSYISYWAYWGQGTLVTVSSGGGGSGGGGSGGGGSQTVVTQEPSLTVSPGGTVTLTCGSSTGAVTSGNYPNWVQQKPGQAPRGLIGGTKFLAPGTPARFSGSLLGGKAALTLSGVQPEDEAEYYCVLWYSNRWVFGGGTKLTVLGGGGDKTHTCPPCPAPELLGGPSVFLFPPKPKDTLMISRTPEVTCVVVDVSHEDPEVKFNWYVDGVEVHNAKTKPCEEQYGSTYRCVSVLTVLHQDWLNGKEYKCKVSNKALPAPIEKTISKAKGQPREPQVYTLPPSREEMTKNQVSLTCLVKGFYPSDIAVEWESNGQPENNYKTTPPVLDSDGSFFLYSKLTVDKSRWQQGNVFSCSVMHEALHNHYTQKSLSLSPGKGGGGSGGGGSGGGGSGGGGSGGGGSGGGGSDKTHTCPPCPAPELLGGPSVFLFPPKPKDTLMISRTPEVTCVVVDVSHEDPEVKFNWYVDGVEVHNAKTKPCEEQYGSTYRCVSVLTVLHQDWLNGKEYKCKVSNKALPAPIEKTISKAKGQPREPQVYTLPPSREEMTKNQVSLTCLVKGFYPSDIAVEWESNGQPENNYKTTPPVLDSDGSFFLYSKLTVDKSRWQQGNVFSCSVMHEALHNHYTQKSLSLSPGK

SEQ ID NO: 3625 - protein, 491 aa, Artificial Sequence
  Synthetic
EVQLLESGGGLVQPGGSLRLSCAASGFTFSSYWMHWVRQTPGKCLEWVSKIDPSDDYTNYNQKVKGRFTISIDKSKNTLYLQMNSLRAEDTAVYYCARWDYSHFDVWGQGTTVTVSSGGGGSGGGGSGGGGSEIVMTQSPATLSVSPGERATLTCRASSSVSYMHWYQQKPGQAPRLLIYGTSNLVSGVPARFSGSGSGTEFTLTISSLQSEDFAVYYCQQWSSYPLTFGCGTKVEIKSGGGGSQVQLVQSGAEVKKPGASVKVSCKASGYTFTGYYIHWVRQAPGQCLEWMGWINPNSGGTNYAQKFQGRVTMTRDTSISTAYMELSRLRSDDTAVYYCARVEAVAGREYYYFSGMDVWGQGTTVTVSSGGGGSGGGGSGGGGSSYELTQPPSVSVSPGQTASITCSGEKLGDKYVYWYQQKPGQSPVLVIYQSTKRPSGVPERFSGSNSGNTATLTISGTQAMDEADYYCQAYHASTAVFGCGTKLTVL

SEQ ID NO: 3626 - protein, 746 aa, Artificial Sequence
  Synthetic
EVQLLESGGGLVQPGGSLRLSCAASGFTFSSYWMHWVRQTPGKCLEWVSKIDPSDDYTNYNQKVKGRFTISIDKSKNTLYLQMNSLRAEDTAVYYCARWDYSHFDVWGQGTTVTVSSGGGGSGGGGSGGGGSEIVMTQSPATLSVSPGERATLTCRASSSVSYMHWYQQKPGQAPRLLIYGTSNLVSGVPARFSGSGSGTEFTLTISSLQSEDFAVYYCQQWSSYPLTFGCGTKVEIKSGGGGSQVQLVQSGAEVKKPGASVKVSCKASGYTFTGYYIHWVRQAPGQCLEWMGWINPNSGGTNYAQKFQGRVTMTRDTSISTAYMELSRLRSDDTAVYYCARVEAVAGREYYYFSGMDVWGQGTTVTVSSGGGGSGGGGSGGGGSSYELTQPPSVSVSPGQTASITCSGEKLGDKYVYWYQQKPGQSPVLVIYQSTKRPSGVPERFSGSNSGNTATLTISGTQAMDEADYYCQAYHASTAVFGCGTKLTVLSGGGGSEVQLVESGGGLVQPGGSLKLSCAASGFTFNKYAMNWVRQAPGKGLEWVARIRSKYNNYATYYADSVKDRFTISRDDSKNTAYLQMNNLKTEDTAVYYCVRHGNFGNSYISYWAYWGQGTLVTVSSGGGGSGGGGSGGGGSQTVVTQEPSLTVSPGGTVTLTCGSSTGAVTSGNYPNWVQQKPGQAPRGLIGGTKFLAPGTPARFSGSLLGGKAALTLSGVQPEDEAEYYCVLWYSNRWVFGGGTKLTVL

SEQ ID NO: 3627 - protein, 1234 aa, Artificial Sequence
  Synthetic
EVQLLESGGGLVQPGGSLRLSCAASGFTFSSYWMHWVRQTPGKCLEWVSKIDPSDDYTNYNQKVKGRFTISIDKSKNTLYLQMNSLRAEDTAVYYCARWDYSHFDVWGQGTTVTVSSGGGGSGGGGSGGGGSEIVMTQSPATLSVSPGERATLTCRASSSVSYMHWYQQKPGQAPRLLIYGTSNLVSGVPARFSGSGSGTEFTLTISSLQSEDFAVYYCQQWSSYPLTFGCGTKVEIKSGGGGSQVQLVQSGAEVKKPGASVKVSCKASGYTFTGYYIHWVRQAPGQCLEWMGWINPNSGGTNYAQKFQGRVTMTRDTSISTAYMELSRLRSDDTAVYYCARVEAVAGREYYYFSGMDVWGQGTTVTVSSGGGGSGGGGSGGGGSSYELTQPPSVSVSPGQTASITCSGEKLGDKYVYWYQQKPGQSPVLVIYQSTKRPSGVPERFSGSNSGNTATLTISGTQAMDEADYYCQAYHASTAVFGCGTKLTVLSGGGGSEVQLVESGGGLVQPGGSLKLSCAASGFTFNKYAMNWVRQAPGKGLEWVARIRSKYNNYATYYADSVKDRFTISRDDSKNTAYLQMNNLKTEDTAVYYCVRHGNFGNSYISYWAYWGQGTLVTVSSGGGGSGGGGSGGGGSQTVVTQEPSLTVSPGGTVTLTCGSSTGAVTSGNYPNWVQQKPGQAPRGLIGGTKFLAPGTPARFSGSLLGGKAALTLSGVQPEDEAEYYCVLWYSNRWVFGGGTKLTVLGGGGDKTHTCPPCPAPELLGGPSVFLFPPKPKDTLMISRTPEVTCVVVDVSHEDPEVKFNWYVDGVEVHNAKTKPCEEQYGSTYRCVSVLTVLHQDWLNGKEYKCKVSNKALPAPIEKTISKAKGQPREPQVYTLPPSREEMTKNQVSLTCLVKGFYPSDIAVEWESNGQPENNYKTTPPVLDSDGSFFLYSKLTVDKSRWQQGNVFSCSVMHEALHNHYTQKSLSLSPGKGGGGSGGGGSGGGGSGGGGSGGGGSGGGGSDKTHTCPPCPAPELLGGPSVFLFPPKPKDTLMISRTPEVTCVVVDVSHEDPEVKFNWYVDGVEVHNAKTKPCEEQYGSTYRCVSVLTVLHQDWLNGKEYKCKVSNKALPAPIEKTISKAKGQPREPQVYTLPPSREEMTKNQVSLTCLVKGFYPSDIAVEWESNGQPENNYKTTPPVLDSDGSFFLYSKLTVDKSRWQQGNVFSCSVMHEALHNHYTQKSLSLSPGK

SEQ ID NO: 3628 - protein, 495 aa, Artificial Sequence
  Synthetic
QVQLVESGGGLVKPGGSLRLSCAASGFTFSDYYMTWIRQAPGKCLEWLSYISSSGSTIYYAEAVKGRFTISRDNAKNSLFLQMNSLRAEDTAVYYCARDRNSHFDYWGQGTLVTVSSGGGGSGGGGSGGGGSDIMTQSPSSVSASVGDRVTITCRASQGIRTWLAWYQQKPGKAPKLLIYGASGLQSGVPSRFSGSGSGTDFTLTISSLQPEDFATYYCQQAESFPRTFGCGTKVEIKSGGGGSEVQLLESGGGLVQPGGSLRLSCAASGFSFSSYPINWVRQAPGKCLEWVGVIWTGGGTNYASSVKGRFTISRDNSKNTVYLQMNSLRAEDTAVYYCAKSRGVYDFKGRGAMDYWGQGTLVTVSSGGGGSGGGGSGGGGSDIVMTQSPDSLAVSLGERATINCKSSQSLLYSSNQKNYFAWYQQKPGQPPKLLIYWASTRESGVPDRFSGSGSGTDFTLTISSLQAEDVAVYYCQQYYSYPYTFGCGTKLEIK

SEQ ID NO: 3629 - protein, 750 aa, Artificial Sequence
  Synthetic
QVQLVESGGGLVKPGGSLRLSCAASGFTFSDYYMTWIRQAPGKCLEWLSYISSSGSTIYYAEAVKGRFTISRDNAKNSLFLQMNSLRAEDTAVYYCARDRNSHFDYWGQGTLVTVSSGGGGSGGGGSGGGGSDIMTQSPSSVSASVGDRVTITCRASQGIRTWLAWYQQKPGKAPKLLIYGASGLQSGVPSRFSGSGSGTDFTLTISSLQPEDFATYYCQQAESFPRTFGCGTKVEIKSGGGGSEVQLLESGGGLVQPGGSLRLSCAASGFSFSSYPINWVRQAPGKCLEWVGVIWTGGGTNYASSVKGRFTISRDNSKNTVYLQMNSLRAEDTAVYYCAKSRGVYDFKGRGAMDYWGQGTLVTVSSGGGGSGGGGSGGGGSDIVMTQSPDSLAVSLGERATINCKSSQSLLYSSNQKNYFAWYQQKPGQPPKLLIYWASTRESGVPDRFSGSGSGTDFTLTISSLQAEDVAVYYCQQYYSYPYTFGCGTKLEIKSGGGGSEVQLVESGGGLVQPGGSLKLSCAASGFTFNKYAMNWVRQAPGKGLEWVARIRSKYNNYATYYADSVKDRFTISRDDSKNTAYLQMNNLKTEDTAVYYCVRHGNFGNSYISYWAYWGQGTLVTVSSGGGGSGGGGSGGGGSQTVVTQEPSLTVSPGGTVTLTCGSSTGAVTSGNYPNWVQQKPGQAPRGLIGGTKFLAPGTPARFSGSLLGGKAALTLSGVQPEDEAEYYCVLWYSNRWVFGGGTKLTVL

SEQ ID NO: 3630 - protein, 1238 aa, Artificial Sequence
  Synthetic
QVQLVESGGGLVKPGGSLRLSCAASGFTFSDYYMTWIRQAPGKCLEWLSYISSSGSTIYYAEAVKGRFTISRDNAKNSLFLQMNSLRAEDTAVYYCARDRNSHFDYWGQGTLVTVSSGGGGSGGGGSGGGGSDIMTQSPSSVSASVGDRVTITCRASQGIRTWLAWYQQKPGKAPKLLIYGASGLQSGVPSRFSGSGSGTDFTLTISSLQPEDFATYYCQQAESFPRTFGCGTKVEIKSGGGGSEVQLLESGGGLVQPGGSLRLSCAASGFSFSSYPINWVRQAPGKCLEWVGVIWTGGGTNYASSVKGRFTISRDNSKNTVYLQMNSLRAEDTAVYYCAKSRGVYDFKGRGAMDYWGQGTLVTVSSGGGGSGGGGSGGGGSDIVMTQSPDSLAVSLGERATINCKSSQSLLYSSNQKNYFAWYQQKPGQPPKLLIYWASTRESGVPDRFSGSGSGTDFTLTISSLQAEDVAVYYCQQYYSYPYTFGCGTKLEIKSGGGGSEVQLVESGGGLVQPGGSLKLSCAASGFTFNKYAMNWVRQAPGKGLEWVARIRSKYNNYATYYADSVKDRFTISRDDSKNTAYLQMNNLKTEDTAVYYCVRHGNFGNSYISYWAYWGQGTLVTVSSGGGGSGGGGSGGGGSQTVVTQEPSLTVSPGGTVTLTCGSSTGAVTSGNYPNWVQQKPGQAPRGLIGGTKFLAPGTPARFSGSLLGGKAALTLSGVQPEDEAEYYCVLWYSNRWVFGGGTKLTVLGGGGDKTHTCPPCPAPELLGGPSVFLFPPKPKDTLMISRTPEVTCVVVDVSHEDPEVKFNWYVDGVEVHNAKTKPCEEQYGSTYRCVSVLTVLHQDWLNGKEYKCKVSNKALPAPIEKTISKAKGQPREPQVYTLPPSREEMTKNQVSLTCLVKGFYPSDIAVEWESNGQPENNYKTTPPVLDSDGSFFLYSKLTVDKSRWQQGNVFSCSVMHEALHNHYTQKSLSLSPGKGGGGSGGGGSGGGGSGGGGSGGGGSGGGGSDKTHTCPPCPAPELLGGPSVFLFPPKPKDTLMISRTPEVTCVVVDVSHEDPEVKFNWYVDGVEVHNAKTKPCEEQYGSTYRCVSVLTVLHQDWLNGKEYKCKVSNKALPAPIEKTISKAKGQPREPQVYTLPPSREEMTKNQVSLTCLVKGFYPSDIAVEWESNGQPENNYKTTPPVLDSDGSFFLYSKLTVDKSRWQQGNVFSCSVMHEALHNHYTQKSLSLSPGK

SEQ ID NO: 3631 - protein, 495 aa, Artificial Sequence
  Synthetic
QVQLVESGGGLVKPGGSLRLSCAASGFTFSDYYMTWIRQAPGKCLEWLSYISSSGSTIYYAEAVKGRFTISRDNAKNSLFLQMNSLRAEDTAVYYCARDRNSHFDYWGQGTLVTVSSGGGGSGGGGSGGGGSDIMTQSPSSVSASVGDRVTITCRASQGIRTWLAWYQQKPGKAPKLLIYGASGLQSGVPSRFSGSGSGTDFTLTISSLQPEDFATYYCQQAESFPRTFGCGTKVEIKSGGGGSEVQLLESGGGLVQPGGSLRLSCAASGFSFSSYPINWVRQAPGKCLEWVGVIWTGGGTNYASSVKGRFTISRDNSKNTVYLQMNSLRAEDTAVYYCAKSRGVYDFDLRGAMDYWGQGTLVTVSSGGGGSGGGGSGGGGSDIVMTQSPDSLAVSLGERATINCKSSQSLLYSSNQKNYFAWYQQKPGQPPKLLIYWASTRESGVPDRFSGSGSGTDFTLTISSLQAEDVAVYYCQQYYSYPYTFGCGTKLEIK

SEQ ID NO: 3632 - protein, 750 aa, Artificial Sequence
  Synthetic
QVQLVESGGGLVKPGGSLRLSCAASGFTFSDYYMTWIRQAPGKCLEWLSYISSSGSTIYYAEAVKGRFTISRDNAKNSLFLQMNSLRAEDTAVYYCARDRNSHFDYWGQGTLVTVSSGGGGSGGGGSGGGGSDIMTQSPSSVSASVGDRVTITCRASQGIRTWLAWYQQKPGKAPKLLIYGASGLQSGVPSRFSGSGSGTDFTLTISSLQPEDFATYYCQQAESFPRTFGCGTKVEIKSGGGGSEVQLLESGGGLVQPGGSLRLSCAASGFSFSSYPINWVRQAPGKCLEWVGVIWTGGGTNYASSVKGRFTISRDNSKNTVYLQMNSLRAEDTAVYYCAKSRGVYDFDLRGAMDYWGQGTLVTVSSGGGGSGGGGSGGGGSDIVMTQSPDSLAVSLGERATINCKSSQSLLYSSNQKNYFAWYQQKPGQPPKLLIYWASTRESGVPDRFSGSGSGTDFTLTISSLQAEDVAVYYCQQYYSYPYTFGCGTKLEIKSGGGGSEVQLVESGGGLVQPGGSLKLSCAASGFTFNKYAMNWVRQAPGKGLEWVARIRSKYNNYATYYADSVKDRFTISRDDSKNTAYLQMNNLKTEDTAVYYCVRHGNFGNSYISYWAYWGQGTLVTVSSGGGGSGGGGSGGGGSQTVVTQEPSLTVSPGGTVTLTCGSSTGAVTSGNYPNWVQQKPGQAPRGLIGGTKFLAPGTPARFSGSLLGGKAALTLSGVQPEDEAEYYCVLWYSNRWVFGGGTKLTVL

SEQ ID NO: 3633 - protein, 1238 aa, Artificial Sequence
  Synthetic
QVQLVESGGGLVKPGGSLRLSCAASGFTFSDYYMTWIRQAPGKCLEWLSYISSSGSTIYYAEAVKGRFTISRDNAKNSLFLQMNSLRAEDTAVYYCARDRNSHFDYWGQGTLVTVSSGGGGSGGGGSGGGGSDIMTQSPSSVSASVGDRVTITCRASQGIRTWLAWYQQKPGKAPKLLIYGASGLQSGVPSRFSGSGSGTDFTLTISSLQPEDFATYYCQQAESFPRTFGCGTKVEIKSGGGGSEVQLLESGGGLVQPGGSLRLSCAASGFSFSSYPINWVRQAPGKCLEWVGVIWTGGGTNYASSVKGRFTISRDNSKNTVYLQMNSLRAEDTAVYYCAKSRGVYDFDLRGAMDYWGQGTLVTVSSGGGGSGGGGSGGGGSDIVMTQSPDSLAVSLGERATINCKSSQSLLYSSNQKNYFAWYQQKPGQPPKLLIYWASTRESGVPDRFSGSGSGTDFTLTISSLQAEDVAVYYCQQYYSYPYTFGCGTKLEIKSGGGGSEVQLVESGGGLVQPGGSLKLSCAASGFTFNKYAMNWVRQAPGKGLEWVARIRSKYNNYATYYADSVKDRFTISRDDSKNTAYLQMNNLKTEDTAVYYCVRHGNFGNSYISYWAYWGQGTLVTVSSGGGGSGGGGSGGGGSQTVVTQEPSLTVSPGGTVTLTCGSSTGAVTSGNYPNWVQQKPGQAPRGLIGGTKFLAPGTPARFSGSLLGGKAALTLSGVQPEDEAEYYCVLWYSNRWVFGGGTKLTVLGGGGDKTHTCPPCPAPELLGGPSVFLFPPKPKDTLMISRTPEVTCVVVDVSHEDPEVKFNWYVDGVEVHNAKTKPCEEQYGSTYRCVSVLTVLHQDWLNGKEYKCKVSNKALPAPIEKTISKAKGQPREPQVYTLPPSREEMTKNQVSLTCLVKGFYPSDIAVEWESNGQPENNYKTTPPVLDSDGSFFLYSKLTVDKSRWQQGNVFSCSVMHEALHNHYTQKSLSLSPGKGGGGSGGGGSGGGGSGGGGSGGGGSGGGGSDKTHTCPPCPAPELLGGPSVFLFPPKPKDTLMISRTPEVTCVVVDVSHEDPEVKFNWYVDGVEVHNAKTKPCEEQYGSTYRCVSVLTVLHQDWLNGKEYKCKVSNKALPAPIEKTISKAKGQPREPQVYTLPPSREEMTKNQVSLTCLVKGFYPSDIAVEWESNGQPENNYKTTPPVLDSDGSFFLYSKLTVDKSRWQQGNVFSCSVMHEALHNHYTQKSLSLSPGK

SEQ ID NO: 3634 - protein, 483 aa, Artificial Sequence
  Synthetic
QVQLVESGGGLVKPGGSLRLSCAASGFTFSDYYMTWIRQAPGKCLEWLSYISSSGSTIYYAEAVKGRFTISRDNAKNSLFLQMNSLRAEDTAVYYCARDRNSHFDYWGQGTLVTVSSGGGGSGGGGSGGGGSDIMTQSPSSVSASVGDRVTITCRASQGIRTWLAWYQQKPGKAPKLLIYGASGLQSGVPSRFSGSGSGTDFTLTISSLQPEDFATYYCQQAESFPRTFGCGTKVEIKSGGGGSQVQLVQSGAEVKKPGASVKVSCKASGYTFTSYWMHWVRQAPGQCLEWMGVIRTSTSYTIYNQKFKGRVTMTRDTSTSTVYMELSSLRSEDTAVYYCARSGPGYFDVWGQGTMVTVSSGGGGSGGGGSGGGGSDIQLTQSPSFLSASVGDRVTITCRASENIYSYLAWYQQKPGKAPKLLIYNAKTLAEGVPSRFSGSGSGTEFTLTISSLQPEDFATYYCQHNYGTPYTFGCGTKLEIK

SEQ ID NO: 3635 - protein, 738 aa, Artificial Sequence
  Synthetic
QVQLVESGGGLVKPGGSLRLSCAASGFTFSDYYMTWIRQAPGKCLEWLSYISSSGSTIYYAEAVKGRFTISRDNAKNSLFLQMNSLRAEDTAVYYCARDRNSHFDYWGQGTLVTVSSGGGGSGGGGSGGGGSDIMTQSPSSVSASVGDRVTITCRASQGIRTWLAWYQQKPGKAPKLLIYGASGLQSGVPSRFSGSGSGTDFTLTISSLQPEDFATYYCQQAESFPRTFGCGTKVEIKSGGGGSQVQLVQSGAEVKKPGASVKVSCKASGYTFTSYWMHWVRQAPGQCLEWMGVIRTSTSYTIYNQKFKGRVTMTRDTSTSTVYMELSSLRSEDTAVYYCARSGPGYFDVWGQGTMVTVSSGGGGSGGGGSGGGGSDIQLTQSPSFLSASVGDRVTITCRASENIYSYLAWYQQKPGKAPKLLIYNAKTLAEGVPSRFSGSGSGTEFTLTISSLQPEDFATYYCQHNYGTPYTFGCGTKLEIKSGGGGSEVQLVESGGGLVQPGGSLKLSCAASGFTFNKYAMNWVRQAPGKGLEWVARIRSKYNNYATYYADSVKDRFTISRDDSKNTAYLQMNNLKTEDTAVYYCVRHGNFGNSYISYWAYWGQGTLVTVSSGGGGSGGGGSGGGGSQTVVTQEPSLTVSPGGTVTLTCGSSTGAVTSGNYPNWVQQKPGQAPRGLIGGTKFLAPGTPARFSGSLLGGKAALTLSGVQPEDEAEYYCVLWYSNRWVFGGGTKLTVL

SEQ ID NO: 3636 - protein, 1226 aa, Artificial Sequence
  Synthetic
QVQLVESGGGLVKPGGSLRLSCAASGFTFSDYYMTWIRQAPGKCLEWLSYISSSGSTIYYAEAVKGRFTISRDNAKNSLFLQMNSLRAEDTAVYYCARDRNSHFDYWGQGTLVTVSSGGGGSGGGGSGGGGSDIMTQSPSSVSASVGDRVTITCRASQGIRTWLAWYQQKPGKAPKLLIYGASGLQSGVPSRFSGSGSGTDFTLTISSLQPEDFATYYCQQAESFPRTFGCGTKVEIKSGGGGSQVQLVQSGAEVKKPGASVKVSCKASGYTFTSYWMHWVRQAPGQCLEWMGVIRTSTSYTIYNQKFKGRVTMTRDTSTSTVYMELSSLRSEDTAVYYCARSGPGYFDVWGQGTMVTVSSGGGGSGGGGSGGGGSDIQLTQSPSFLSASVGDRVTITCRASENIYSYLAWYQQKPGKAPKLLIYNAKTLAEGVPSRFSGSGSGTEFTLTISSLQPEDFATYYCQHNYGTPYTFGCGTKLEIKSGGGGSEVQLVESGGGLVQPGGSLKLSCAASGFTFNKYAMNWVRQAPGKGLEWVARIRSKYNNYATYYADSVKDRFTISRDDSKNTAYLQMNNLKTEDTAVYYCVRHGNFGNSYISYWAYWGQGTLVTVSSGGGGSGGGGSGGGGSQTVVTQEPSLTVSPGGTVTLTCGSSTGAVTSGNYPNWVQQKPGQAPRGLIGGTKFLAPGTPARFSGSLLGGKAALTLSGVQPEDEAEYYCVLWYSNRWVFGGGTKLTVLGGGGDKTHTCPPCPAPELLGGPSVFLFPPKPKDTLMISRTPEVTCVVVDVSHEDPEVKFNWYVDGVEVHNAKTKPCEEQYGSTYRCVSVLTVLHQDWLNGKEYKCKVSNKALPAPIEKTISKAKGQPREPQVYTLPPSREEMTKNQVSLTCLVKGFYPSDIAVEWESNGQPENNYKTTPPVLDSDGSFFLYSKLTVDKSRWQQGNVFSCSVMHEALHNHYTQKSLSLSPGKGGGGSGGGGSGGGGSGGGGSGGGGSGGGGSDKTHTCPPCPAPELLGGPSVFLFPPKPKDTLMISRTPEVTCVVVDVSHEDPEVKFNWYVDGVEVHNAKTKPCEEQYGSTYRCVSVLTVLHQDWLNGKEYKCKVSNKALPAPIEKTISKAKGQPREPQVYTLPPSREEMTKNQVSLTCLVKGFYPSDIAVEWESNGQPENNYKTTPPVLDSDGSFFLYSKLTVDKSRWQQGNVFSCSVMHEALHNHYTQKSLSLSPGK

SEQ ID NO: 3637 - protein, 488 aa, Artificial Sequence
  Synthetic
QVQLQESGPGLVKPSETLSLTCTVSGGSISSSSYFWGWIRQPPGKCLEWIGNIYYSGSSNYNPSLKSRVTISVDTSKNQFSLKLSSVTAADTAVYYCARLPRGDRDAFDIWGQGTMVTVSSGGGGSGGGGSGGGGSDIVMTQSPSSLSASVGDRVTITCRASQGISNYLAWYQQKPGKVPKLLIYAASTLQSGVPSRFSGSGSGTDFTLTISSLQPEDFATYYCQQSYSTPFTFGCGTKVEIKSGGGGSQVQLVQSGAEVKKPGASVKVSCKASGYTFTSYWMHWVRQAPGQCLEWMGVIYTSGSYTIYNQKFQGRVTMTRDTSTSTAYMELSSLRSEDTAVYYCARSGPGYFDVWGQGTMVTVSSGGGGSGGGGSGGGGSDIQLTQSPSFLSASVGDRVTITCRASGNIHNYLAWYQQKPGKAPKLLIYNAKTLAEGVPSRFSGSGSGTEFTLKISSLQPEDFATYYCQHFAWTPYTFGCGTKLEIK

SEQ ID NO: 3638 - protein, 743 aa, Artificial Sequence
  Synthetic
QVQLQESGPGLVKPSETLSLTCTVSGGSISSSSYFWGWIRQPPGKCLEWIGNIYYSGSSNYNPSLKSRVTISVDTSKNQFSLKLSSVTAADTAVYYCARLPRGDRDAFDIWGQGTMVTVSSGGGGSGGGGSGGGGSDIVMTQSPSSLSASVGDRVTITCRASQGISNYLAWYQQKPGKVPKLLIYAASTLQSGVPSRFSGSGSGTDFTLTISSLQPEDFATYYCQQSYSTPFTFGCGTKVEIKSGGGGSQVQLVQSGAEVKKPGASVKVSCKASGYTFTSYWMHWVRQAPGQCLEWMGVIYTSGSYTIYNQKFQGRVTMTRDTSTSTAYMELSSLRSEDTAVYYCARSGPGYFDVWGQGTMVTVSSGGGGSGGGGSGGGGSDIQLTQSPSFLSASVGDRVTITCRASGNIHNYLAWYQQKPGKAPKLLIYNAKTLAEGVPSRFSGSGSGTEFTLKISSLQPEDFATYYCQHFAWTPYTFGCGTKLEIKSGGGGSEVQLVESGGGLVQPGGSLKLSCAASGFTFNKYAMNWVRQAPGKGLEWVARIRSKYNNYATYYADSVKDRFTISRDDSKNTAYLQMNNLKTEDTAVYYCVRHGNFGNSYISYWAYWGQGTLVTVSSGGGGSGGGGSGGGGSQTVVTQEPSLTVSPGGTVTLTCGSSTGAVTSGNYPNWVQQKPGQAPRGLIGGTKFLAPGTPARFSGSLLGGKAALTLSGVQPEDEAEYYCVLWYSNRWVFGGGTKLTVL

SEQ ID NO: 3639 - protein, 1231 aa, Artificial Sequence
  Synthetic
QVQLQESGPGLVKPSETLSLTCTVSGGSISSSSYFWGWIRQPPGKCLEWIGNIYYSGSSNYNPSLKSRVTISVDTSKNQFSLKLSSVTAADTAVYYCARLPRGDRDAFDIWGQGTMVTVSSGGGGSGGGGSGGGGSDIVMTQSPSSLSASVGDRVTITCRASQGISNYLAWYQQKPGKVPKLLIYAASTLQSGVPSRFSGSGSGTDFTLTISSLQPEDFATYYCQQSYSTPFTFGCGTKVEIKSGGGGSQVQLVQSGAEVKKPGASVKVSCKASGYTFTSYWMHWVRQAPGQCLEWMGVIYTSGSYTIYNQKFQGRVTMTRDTSTSTAYMELSSLRSEDTAVYYCARSGPGYFDVWGQGTMVTVSSGGGGSGGGGSGGGGSDIQLTQSPSFLSASVGDRVTITCRASGNIHNYLAWYQQKPGKAPKLLIYNAKTLAEGVPSRFSGSGSGTEFTLKISSLQPEDFATYYCQHFAWTPYTFGCGTKLEIKSGGGGSEVQLVESGGGLVQPGGSLKLSCAASGFTFNKYAMNWVRQAPGKGLEWVARIRSKYNNYATYYADSVKDRFTISRDDSKNTAYLQMNNLKTEDTAVYYCVRHGNFGNSYISYWAYWGQGTLVTVSSGGGGSGGGGSGGGGSQTVVTQEPSLTVSPGGTVTLTCGSSTGAVTSGNYPNWVQQKPGQAPRGLIGGTKFLAPGTPARFSGSLLGGKAALTLSGVQPEDEAEYYCVLWYSNRWVFGGGTKLTVLGGGGDKTHTCPPCPAPELLGGPSVFLFPPKPKDTLMISRTPEVTCVVVDVSHEDPEVKFNWYVDGVEVHNAKTKPCEEQYGSTYRCVSVLTVLHQDWLNGKEYKCKVSNKALPAPIEKTISKAKGQPREPQVYTLPPSREEMTKNQVSLTCLVKGFYPSDIAVEWESNGQPENNYKTTPPVLDSDGSFFLYSKLTVDKSRWQQGNVFSCSVMHEALHNHYTQKSLSLSPGKGGGGSGGGGSGGGGSGGGGSGGGGSGGGGSDKTHTCPPCPAPELLGGPSVFLFPPKPKDTLMISRTPEVTCVVVDVSHEDPEVKFNWYVDGVEVHNAKTKPCEEQYGSTYRCVSVLTVLHQDWLNGKEYKCKVSNKALPAPIEKTISKAKGQPREPQVYTLPPSREEMTKNQVSLTCLVKGFYPSDIAVEWESNGQPENNYKTTPPVLDSDGSFFLYSKLTVDKSRWQQGNVFSCSVMHEALHNHYTQKSLSLSPGK

SEQ ID NO: 3640 - protein, 488 aa, Artificial Sequence
  Synthetic
QVQLQESGPGLVKPSETLSLTCTVSGGSISSSSYFWGWIRQPPGKCLEWIGNIYYSGSSNYNPSLKSRVTISVDTSKNQFSLKLSSVTAADTAVYYCARLPRGDRDAFDIWGQGTMVTVSSGGGGSGGGGSGGGGSDIVMTQSPSSLSASVGDRVTITCRASQGISNYLAWYQQKPGKVPKLLIYAASTLQSGVPSRFSGSGSGTDFTLTISSLQPEDFATYYCQQSYSTPFTFGCGTKVEIKSGGGGSQVQLVQSGAEVKKPGASVKVSCKASGYTFTNYWMNWVRQAPGQCLEWMGNIHSKAHGTNYNQKFQGRVTMTVDTSSSTAYMELSRLRSDDTAVYYCATRYFYVMDYWGQGTLVTVSSGGGGSGGGGSGGGGSDIQMTQSPSSLSASVGDRVTITCRASQDISNYLNWYQQKPGKVPKLLIYYTSRLHSGVPSRFSGSGSGTDFTLTISSLQPEDVATYYCVQYAQFPLTFGCGTKVEIK

SEQ ID NO: 3641 - protein, 743 aa, Artificial Sequence
  Synthetic
QVQLQESGPGLVKPSETLSLTCTVSGGSISSSSYFWGWIRQPPGKCLEWIGNIYYSGSSNYNPSLKSRVTISVDTSKNQFSLKLSSVTAADTAVYYCARLPRGDRDAFDIWGQGTMVTVSSGGGGSGGGGSGGGGSDIVMTQSPSSLSASVGDRVTITCRASQGISNYLAWYQQKPGKVPKLLIYAASTLQSGVPSRFSGSGSGTDFTLTISSLQPEDFATYYCQQSYSTPFTFGCGTKVEIKSGGGGSQVQLVQSGAEVKKPGASVKVSCKASGYTFTNYWMNWVRQAPGQCLEWMGNIHSKAHGTNYNQKFQGRVTMTVDTSSSTAYMELSRLRSDDTAVYYCATRYFYVMDYWGQGTLVTVSSGGGGSGGGGSGGGGSDIQMTQSPSSLSASVGDRVTITCRASQDISNYLNWYQQKPGKVPKLLIYYTSRLHSGVPSRFSGSGSGTDFTLTISSLQPEDVATYYCVQYAQFPLTFGCGTKVEIKSGGGGSEVQLVESGGGLVQPGGSLKLSCAASGFTFNKYAMNWVRQAPGKGLEWVARIRSKYNNYATYYADSVKDRFTISRDDSKNTAYLQMNNLKTEDTAVYYCVRHGNFGNSYISYWAYWGQGTLVTVSSGGGGSGGGGSGGGGSQTVVTQEPSLTVSPGGTVTLTCGSSTGAVTSGNYPNWVQQKPGQAPRGLIGGTKFLAPGTPARFSGSLLGGKAALTLSGVQPEDEAEYYCVLWYSNRWVFGGGTKLTVL

SEQ ID NO: 3642 - protein, 1231 aa, Artificial Sequence
  Synthetic
QVQLQESGPGLVKPSETLSLTCTVSGGSISSSSYFWGWIRQPPGKCLEWIGNIYYSGSSNYNPSLKSRVTISVDTSKNQFSLKLSSVTAADTAVYYCARLPRGDRDAFDIWGQGTMVTVSSGGGGSGGGGSGGGGSDIVMTQSPSSLSASVGDRVTITCRASQGISNYLAWYQQKPGKVPKLLIYAASTLQSGVPSRFSGSGSGTDFTLTISSLQPEDFATYYCQQSYSTPFTFGCGTKVEIKSGGGGSQVQLVQSGAEVKKPGASVKVSCKASGYTFTNYWMNWVRQAPGQCLEWMGNIHSKAHGTNYNQKFQGRVTMTVDTSSSTAYMELSRLRSDDTAVYYCATRYFYVMDYWGQGTLVTVSSGGGGSGGGGSGGGGSDIQMTQSPSSLSASVGDRVTITCRASQDISNYLNWYQQKPGKVPKLLIYYTSRLHSGVPSRFSGSGSGTDFTLTISSLQPEDVATYYCVQYAQFPLTFGCGTKVEIKSGGGGSEVQLVESGGGLVQPGGSLKLSCAASGFTFNKYAMNWVRQAPGKGLEWVARIRSKYNNYATYYADSVKDRFTISRDDSKNTAYLQMNNLKTEDTAVYYCVRHGNFGNSYISYWAYWGQGTLVTVSSGGGGSGGGGSGGGGSQTVVTQEPSLTVSPGGTVTLTCGSSTGAVTSGNYPNWVQQKPGQAPRGLIGGTKFLAPGTPARFSGSLLGGKAALTLSGVQPEDEAEYYCVLWYSNRWVFGGGTKLTVLGGGGDKTHTCPPCPAPELLGGPSVFLFPPKPKDTLMISRTPEVTCVVVDVSHEDPEVKFNWYVDGVEVHNAKTKPCEEQYGSTYRCVSVLTVLHQDWLNGKEYKCKVSNKALPAPIEKTISKAKGQPREPQVYTLPPSREEMTKNQVSLTCLVKGFYPSDIAVEWESNGQPENNYKTTPPVLDSDGSFFLYSKLTVDKSRWQQGNVFSCSVMHEALHNHYTQKSLSLSPGKGGGGSGGGGSGGGGSGGGGSGGGGSGGGGSDKTHTCPPCPAPELLGGPSVFLFPPKPKDTLMISRTPEVTCVVVDVSHEDPEVKFNWYVDGVEVHNAKTKPCEEQYGSTYRCVSVLTVLHQDWLNGKEYKCKVSNKALPAPIEKTISKAKGQPREPQVYTLPPSREEMTKNQVSLTCLVKGFYPSDIAVEWESNGQPENNYKTTPPVLDSDGSFFLYSKLTVDKSRWQQGNVFSCSVMHEALHNHYTQKSLSLSPGK

SEQ ID NO: 3643 - protein, 489 aa, Artificial Sequence
  Synthetic
QVQLQESGPGLVKPSETLSLTCTVSGGSISSSSYFWVWIRQPPGKCLEWIGSIYYSGSTYYNPSLKSRVTISVDTSKNQFSLKLNSVTAADTAVYYCARLPRGDRMTFDIWGQGTMVTVSSGGGGSGGGGSGGGGSEIVLTQSPGTLSLSPGERATLSCRASQSVSSSYLAWYQQKPGQAPRLLIYGASSRATGIPDRFSGSGSGTDFTLTISRLEPEDFAVYYCQQYGSSPFTFGCGTKLEIKSGGGGSEVQLLESGGGLVQPGGSLRLSCAASGYTFSSYWMHWVRQAPGKCLEWMGVISGSKSYTIYNQKVKGRFTISRDNSKNTVYLQMNSLRAGDTAVYYCARSGPGYFDVWGQGTMVTVSSGGGGSGGGGSGGGGSDIQLTQSPSFLSASVGDRVTITCRASENIYSYLAWYQQKPGKAPKLLIYNAKTLAEGVPSRFSGSGSGTEFTLTISSLQPEDFGTYYCQHLNMTPYTFGCGTKLEIK

SEQ ID NO: 3644 - protein, 744 aa, Artificial Sequence
  Synthetic
QVQLQESGPGLVKPSETLSLTCTVSGGSISSSSYFWVWIRQPPGKCLEWIGSIYYSGSTYYNPSLKSRVTISVDTSKNQFSLKLNSVTAADTAVYYCARLPRGDRMTFDIWGQGTMVTVSSGGGGSGGGGSGGGGSEIVLTQSPGTLSLSPGERATLSCRASQSVSSSYLAWYQQKPGQAPRLLIYGASSRATGIPDRFSGSGSGTDFTLTISRLEPEDFAVYYCQQYGSSPFTFGCGTKLEIKSGGGGSEVQLLESGGGLVQPGGSLRLSCAASGYTFSSYWMHWVRQAPGKCLEWMGVISGSKSYTIYNQKVKGRFTISRDNSKNTVYLQMNSLRAGDTAVYYCARSGPGYFDVWGQGTMVTVSSGGGGSGGGGSGGGGSDIQLTQSPSFLSASVGDRVTITCRASENIYSYLAWYQQKPGKAPKLLIYNAKTLAEGVPSRFSGSGSGTEFTLTISSLQPEDFGTYYCQHLNMTPYTFGCGTKLEIKSGGGGSEVQLVESGGGLVQPGGSLKLSCAASGFTFNKYAMNWVRQAPGKGLEWVARIRSKYNNYATYYADSVKDRFTISRDDSKNTAYLQMNNLKTEDTAVYYCVRHGNFGNSYISYWAYWGQGTLVTVSSGGGGSGGGGSGGGGSQTVVTQEPSLTVSPGGTVTLTCGSSTGAVTSGNYPNWVQQKPGQAPRGLIGGTKFLAPGTPARFSGSLLGGKAALTLSGVQPEDEAEYYCVLWYSNRWVFGGGTKLTVL

SEQ ID NO: 3645 - protein, 1232 aa, Artificial Sequence
  Synthetic
QVQLQESGPGLVKPSETLSLTCTVSGGSISSSSYFWVWIRQPPGKCLEWIGSIYYSGSTYYNPSLKSRVTISVDTSKNQFSLKLNSVTAADTAVYYCARLPRGDRMTFDIWGQGTMVTVSSGGGGSGGGGSGGGGSEIVLTQSPGTLSLSPGERATLSCRASQSVSSSYLAWYQQKPGQAPRLLIYGASSRATGIPDRFSGSGSGTDFTLTISRLEPEDFAVYYCQQYGSSPFTFGCGTKLEIKSGGGGSEVQLLESGGGLVQPGGSLRLSCAASGYTFSSYWMHWVRQAPGKCLEWMGVISGSKSYTIYNQKVKGRFTISRDNSKNTVYLQMNSLRAGDTAVYYCARSGPGYFDVWGQGTMVTVSSGGGGSGGGGSGGGGSDIQLTQSPSFLSASVGDRVTITCRASENIYSYLAWYQQKPGKAPKLLIYNAKTLAEGVPSRFSGSGSGTEFTLTISSLQPEDFGTYYCQHLNMTPYTFGCGTKLEIKSGGGGSEVQLVESGGGLVQPGGSLKLSCAASGFTFNKYAMNWVRQAPGKGLEWVARIRSKYNNYATYYADSVKDRFTISRDDSKNTAYLQMNNLKTEDTAVYYCVRHGNFGNSYISYWAYWGQGTLVTVSSGGGGSGGGGSGGGGSQTVVTQEPSLTVSPGGTVTLTCGSSTGAVTSGNYPNWVQQKPGQAPRGLIGGTKFLAPGTPARFSGSLLGGKAALTLSGVQPEDEAEYYCVLWYSNRWVFGGGTKLTVLGGGGDKTHTCPPCPAPELLGGPSVFLFPPKPKDTLMISRTPEVTCVVVDVSHEDPEVKFNWYVDGVEVHNAKTKPCEEQYGSTYRCVSVLTVLHQDWLNGKEYKCKVSNKALPAPIEKTISKAKGQPREPQVYTLPPSREEMTKNQVSLTCLVKGFYPSDIAVEWESNGQPENNYKTTPPVLDSDGSFFLYSKLTVDKSRWQQGNVFSCSVMHEALHNHYTQKSLSLSPGKGGGGSGGGGSGGGGSGGGGSGGGGSGGGGSDKTHTCPPCPAPELLGGPSVFLFPPKPKDTLMISRTPEVTCVVVDVSHEDPEVKFNWYVDGVEVHNAKTKPCEEQYGSTYRCVSVLTVLHQDWLNGKEYKCKVSNKALPAPIEKTISKAKGQPREPQVYTLPPSREEMTKNQVSLTCLVKGFYPSDIAVEWESNGQPENNYKTTPPVLDSDGSFFLYSKLTVDKSRWQQGNVFSCSVMHEALHNHYTQKSLSLSPGK

SEQ ID NO: 3646 - protein, 492 aa, Artificial Sequence
  Synthetic
EVQLLESGGGVVQPGRSLRLSCAASGFTFSSYAMSWVRQAPGKCLEWVSAISGSGEQWYYAPSVKGRFTISRDNSKNTLYLQMNSLRAEDTAVYYCAKVRNYYGSGSLDYWGQGTLVTVSSGGGGSGGGGSGGGGSEIVLTQSPGTLSLSPGERATLSCRASQSFSSAYLAWYQQKPGQAPRLLIYGASIRATGIPDRFSGSGSGTDFTLTISRLEPEDFAVYYCQQYGSSLTFGCGTKVEIKSGGGGSQVQLVQSGAEVVKPGASVKVSCKASGYTFTSSWMNWVRQAPGQCLEWMGRIYTGTGETKYSGKFQGRVTITRDTSASTAYMELSSLTSEDTAVYYCARQRDYGALYAMDYWGQGTLVTVSSGGGGSGGGGSGGGGSDIQLTQSPSFLSASVGDRVTITCRASDDIYSYLAWYQQKPGKAPKLLVYNAKTLAEGVPSRFSGSGSGTEFTLTISSLQPEDFATYYCQNHDRTPFTFGCGTKVDIK

SEQ ID NO: 3647 - protein, 747 aa, Artificial Sequence
  Synthetic
EVQLLESGGGVVQPGRSLRLSCAASGFTFSSYAMSWVRQAPGKCLEWVSAISGSGEQWYYAPSVKGRFTISRDNSKNTLYLQMNSLRAEDTAVYYCAKVRNYYGSGSLDYWGQGTLVTVSSGGGGSGGGGSGGGGSEIVLTQSPGTLSLSPGERATLSCRASQSFSSAYLAWYQQKPGQAPRLLIYGASIRATGIPDRFSGSGSGTDFTLTISRLEPEDFAVYYCQQYGSSLTFGCGTKVEIKSGGGGSQVQLVQSGAEVVKPGASVKVSCKASGYTFTSSWMNWVRQAPGQCLEWMGRIYTGTGETKYSGKFQGRVTITRDTSASTAYMELSSLTSEDTAVYYCARQRDYGALYAMDYWGQGTLVTVSSGGGGSGGGGSGGGGSDIQLTQSPSFLSASVGDRVTITCRASDDIYSYLAWYQQKPGKAPKLLVYNAKTLAEGVPSRFSGSGSGTEFTLTISSLQPEDFATYYCQNHDRTPFTFGCGTKVDIKSGGGGSEVQLVESGGGLVQPGGSLKLSCAASGFTFNKYAMNWVRQAPGKGLEWVARIRSKYNNYATYYADSVKDRFTISRDDSKNTAYLQMNNLKTEDTAVYYCVRHGNFGNSYISYWAYWGQGTLVTVSSGGGGSGGGGSGGGGSQTVVTQEPSLTVSPGGTVTLTCGSSTGAVTSGNYPNWVQQKPGQAPRGLIGGTKFLAPGTPARFSGSLLGGKAALTLSGVQPEDEAEYYCVLWYSNRWVFGGGTKLTVL

SEQ ID NO: 3648 - protein, 1235 aa, Artificial Sequence
  Synthetic
EVQLLESGGGVVQPGRSLRLSCAASGFTFSSYAMSWVRQAPGKCLEWVSAISGSGEQWYYAPSVKGRFTISRDNSKNTLYLQMNSLRAEDTAVYYCAKVRNYYGSGSLDYWGQGTLVTVSSGGGGSGGGGSGGGGSEIVLTQSPGTLSLSPGERATLSCRASQSFSSAYLAWYQQKPGQAPRLLIYGASIRATGIPDRFSGSGSGTDFTLTISRLEPEDFAVYYCQQYGSSLTFGCGTKVEIKSGGGGSQVQLVQSGAEVVKPGASVKVSCKASGYTFTSSWMNWVRQAPGQCLEWMGRIYTGTGETKYSGKFQGRVTITRDTSASTAYMELSSLTSEDTAVYYCARQRDYGALYAMDYWGQGTLVTVSSGGGGSGGGGSGGGGSDIQLTQSPSFLSASVGDRVTITCRASDDIYSYLAWYQQKPGKAPKLLVYNAKTLAEGVPSRFSGSGSGTEFTLTISSLQPEDFATYYCQNHDRTPFTFGCGTKVDIKSGGGGSEVQLVESGGGLVQPGGSLKLSCAASGFTFNKYAMNWVRQAPGKGLEWVARIRSKYNNYATYYADSVKDRFTISRDDSKNTAYLQMNNLKTEDTAVYYCVRHGNFGNSYISYWAYWGQGTLVTVSSGGGGSGGGGSGGGGSQTVVTQEPSLTVSPGGTVTLTCGSSTGAVTSGNYPNWVQQKPGQAPRGLIGGTKFLAPGTPARFSGSLLGGKAALTLSGVQPEDEAEYYCVLWYSNRWVFGGGTKLTVLGGGGDKTHTCPPCPAPELLGGPSVFLFPPKPKDTLMISRTPEVTCVVVDVSHEDPEVKFNWYVDGVEVHNAKTKPCEEQYGSTYRCVSVLTVLHQDWLNGKEYKCKVSNKALPAPIEKTISKAKGQPREPQVYTLPPSREEMTKNQVSLTCLVKGFYPSDIAVEWESNGQPENNYKTTPPVLDSDGSFFLYSKLTVDKSRWQQGNVFSCSVMHEALHNHYTQKSLSLSPGKGGGGSGGGGSGGGGSGGGGSGGGGSGGGGSDKTHTCPPCPAPELLGGPSVFLFPPKPKDTLMISRTPEVTCVVVDVSHEDPEVKFNWYVDGVEVHNAKTKPCEEQYGSTYRCVSVLTVLHQDWLNGKEYKCKVSNKALPAPIEKTISKAKGQPREPQVYTLPPSREEMTKNQVSLTCLVKGFYPSDIAVEWESNGQPENNYKTTPPVLDSDGSFFLYSKLTVDKSRWQQGNVFSCSVMHEALHNHYTQKSLSLSPGK

SEQ ID NO: 3649 - protein, 492 aa, Artificial Sequence
  Synthetic
EVQLLESGGGVVQPGRSLRLSCAASGFTFSSYAMSWVRQAPGMCLEWVSAISGSGEGDYYANSVKGRFTISRDNSKNTLYLQMNSLRAEDTAVYYCAKVRNYYGSGSLDYWGQGTLVTVSSGGGGSGGGGSGGGGSEIVLTQSPGTLSLSPGERATLSCRASQSVSSTYLAWYQQKPGQAPRLLIYGASIRATGIPDRFSGSGSGTDFTLTISRLEPEDFAVYYCQQYGSSLTFGCGTKVEIKSGGGGSEVQLLESGGGLVQPGGSLRLSCAASGFTFSSSWMNWVRQAPGKCLEWVGRIYMGDAETKYNDKVKGRFTISRDKSKNTVYLQMNSLRAEDTAVYYCAKQRDYGALYAMDYWGQGTLVTVSSGGGGSGGGGSGGGGSDIQLTQSPSFLSASVGDRVTITCRASDDIYSYLAWYQQKPGKAPKLLIYNSKTLAEGVPSRFSGSGSGTQFTLTISSLQPEDFATYYCQNHVYFPQTFGCGTKVDIK

SEQ ID NO: 3650 - protein, 747 aa, Artificial Sequence
  Synthetic
EVQLLESGGGVVQPGRSLRLSCAASGFTFSSYAMSWVRQAPGMCLEWVSAISGSGEGDYYANSVKGRFTISRDNSKNTLYLQMNSLRAEDTAVYYCAKVRNYYGSGSLDYWGQGTLVTVSSGGGGSGGGGSGGGGSEIVLTQSPGTLSLSPGERATLSCRASQSVSSTYLAWYQQKPGQAPRLLIYGASIRATGIPDRFSGSGSGTDFTLTISRLEPEDFAVYYCQQYGSSLTFGCGTKVEIKSGGGGSEVQLLESGGGLVQPGGSLRLSCAASGFTFSSSWMNWVRQAPGKCLEWVGRIYMGDAETKYNDKVKGRFTISRDKSKNTVYLQMNSLRAEDTAVYYCAKQRDYGALYAMDYWGQGTLVTVSSGGGGSGGGGSGGGGSDIQLTQSPSFLSASVGDRVTITCRASDDIYSYLAWYQQKPGKAPKLLIYNSKTLAEGVPSRFSGSGSGTQFTLTISSLQPEDFATYYCQNHVYFPQTFGCGTKVDIKSGGGGSEVQLVESGGGLVQPGGSLKLSCAASGFTFNKYAMNWVRQAPGKGLEWVARIRSKYNNYATYYADSVKDRFTISRDDSKNTAYLQMNNLKTEDTAVYYCVRHGNFGNSYISYWAYWGQGTLVTVSSGGGGSGGGGSGGGGSQTVVTQEPSLTVSPGGTVTLTCGSSTGAVTSGNYPNWVQQKPGQAPRGLIGGTKFLAPGTPARFSGSLLGGKAALTLSGVQPEDEAEYYCVLWYSNRWVFGGGTKLTVL

SEQ ID NO: 3651 - protein, 1235 aa, Artificial Sequence
  Synthetic
EVQLLESGGGVVQPGRSLRLSCAASGFTFSSYAMSWVRQAPGMCLEWVSAISGSGEGDYYANSVKGRFTISRDNSKNTLYLQMNSLRAEDTAVYYCAKVRNYYGSGSLDYWGQGTLVTVSSGGGGSGGGGSGGGGSEIVLTQSPGTLSLSPGERATLSCRASQSVSSTYLAWYQQKPGQAPRLLIYGASIRATGIPDRFSGSGSGTDFTLTISRLEPEDFAVYYCQQYGSSLTFGCGTKVEIKSGGGGSEVQLLESGGGLVQPGGSLRLSCAASGFTFSSSWMNWVRQAPGKCLEWVGRIYMGDAETKYNDKVKGRFTISRDKSKNTVYLQMNSLRAEDTAVYYCAKQRDYGALYAMDYWGQGTLVTVSSGGGGSGGGGSGGGGSDIQLTQSPSFLSASVGDRVTITCRASDDIYSYLAWYQQKPGKAPKLLIYNSKTLAEGVPSRFSGSGSGTQFTLTISSLQPEDFATYYCQNHVYFPQTFGCGTKVDIKSGGGGSEVQLVESGGGLVQPGGSLKLSCAASGFTFNKYAMNWVRQAPGKGLEWVARIRSKYNNYATYYADSVKDRFTISRDDSKNTAYLQMNNLKTEDTAVYYCVRHGNFGNSYISYWAYWGQGTLVTVSSGGGGSGGGGSGGGGSQTVVTQEPSLTVSPGGTVTLTCGSSTGAVTSGNYPNWVQQKPGQAPRGLIGGTKFLAPGTPARFSGSLLGGKAALTLSGVQPEDEAEYYCVLWYSNRWVFGGGTKLTVLGGGGDKTHTCPPCPAPELLGGPSVFLFPPKPKDTLMISRTPEVTCVVVDVSHEDPEVKFNWYVDGVEVHNAKTKPCEEQYGSTYRCVSVLTVLHQDWLNGKEYKCKVSNKALPAPIEKTISKAKGQPREPQVYTLPPSREEMTKNQVSLTCLVKGFYPSDIAVEWESNGQPENNYKTTPPVLDSDGSFFLYSKLTVDKSRWQQGNVFSCSVMHEALHNHYTQKSLSLSPGKGGGGSGGGGSGGGGSGGGGSGGGGSGGGGSDKTHTCPPCPAPELLGGPSVFLFPPKPKDTLMISRTPEVTCVVVDVSHEDPEVKFNWYVDGVEVHNAKTKPCEEQYGSTYRCVSVLTVLHQDWLNGKEYKCKVSNKALPAPIEKTISKAKGQPREPQVYTLPPSREEMTKNQVSLTCLVKGFYPSDIAVEWESNGQPENNYKTTPPVLDSDGSFFLYSKLTVDKSRWQQGNVFSCSVMHEALHNHYTQKSLSLSPGK

SEQ ID NO: 3652 - protein, 488 aa, Artificial Sequence
  Synthetic
EVQLLESGGGVVQPGRSLRLSCAASGFTFSSYAMSWVRQAPGMCLEWVSAISGSGEGDYYANSVKGRFTISRDNSKNTLYLQMNSLRAEDTAVYYCAKVRNYYGSGSLDYWGQGTLVTVSSGGGGSGGGGSGGGGSEIVLTQSPGTLSLSPGERATLSCRASQSVSSTYLAWYQQKPGQAPRLLIYGASIRATGIPDRFSGSGSGTDFTLTISRLEPEDFAVYYCQQYGSSLTFGCGTKVEIKSGGGGSQVQLVQSGAEVKKPGASVKVSCKASGYTFTNYWMNWVRQAPGQCLEWMGNIAYGVKGTNYNQKFQGRVTMTVDTSSSTAYMELSRLRSDDTAVYYCATRYFYVMDYWGQGTLVTVSSGGGGSGGGGSGGGGSDIQMTQSPSSLSASVGDRVTITCRASQDISNYLNWYQQKPGKVPKLLIYYTSRLHSGVPSRFSGSGSGTDFTLTISSLQPEDVATYYCVQYAQFPLTFGCGTKVEIK

SEQ ID NO: 3653 - protein, 743 aa, Artificial Sequence
  Synthetic
EVQLLESGGGVVQPGRSLRLSCAASGFTFSSYAMSWVRQAPGMCLEWVSAISGSGEGDYYANSVKGRFTISRDNSKNTLYLQMNSLRAEDTAVYYCAKVRNYYGSGSLDYWGQGTLVTVSSGGGGSGGGGSGGGGSEIVLTQSPGTLSLSPGERATLSCRASQSVSSTYLAWYQQKPGQAPRLLIYGASIRATGIPDRFSGSGSGTDFTLTISRLEPEDFAVYYCQQYGSSLTFGCGTKVEIKSGGGGSQVQLVQSGAEVKKPGASVKVSCKASGYTFTNYWMNWVRQAPGQCLEWMGNIAYGVKGTNYNQKFQGRVTMTVDTSSSTAYMELSRLRSDDTAVYYCATRYFYVMDYWGQGTLVTVSSGGGGSGGGGSGGGGSDIQMTQSPSSLSASVGDRVTITCRASQDISNYLNWYQQKPGKVPKLLIYYTSRLHSGVPSRFSGSGSGTDFTLTISSLQPEDVATYYCVQYAQFPLTFGCGTKVEIKSGGGGSEVQLVESGGGLVQPGGSLKLSCAASGFTFNKYAMNWVRQAPGKGLEWVARIRSKYNNYATYYADSVKDRFTISRDDSKNTAYLQMNNLKTEDTAVYYCVRHGNFGNSYISYWAYWGQGTLVTVSSGGGGSGGGGSGGGGSQTVVTQEPSLTVSPGGTVTLTCGSSTGAVTSGNYPNWVQQKPGQAPRGLIGGTKFLAPGTPARFSGSLLGGKAALTLSGVQPEDEAEYYCVLWYSNRWVFGGGTKLTVL

SEQ ID NO: 3654 - protein, 1231 aa, Artificial Sequence
  Synthetic
EVQLLESGGGVVQPGRSLRLSCAASGFTFSSYAMSWVRQAPGMCLEWVSAISGSGEGDYYANSVKGRFTISRDNSKNTLYLQMNSLRAEDTAVYYCAKVRNYYGSGSLDYWGQGTLVTVSSGGGGSGGGGSGGGGSEIVLTQSPGTLSLSPGERATLSCRASQSVSSTYLAWYQQKPGQAPRLLIYGASIRATGIPDRFSGSGSGTDFTLTISRLEPEDFAVYYCQQYGSSLTFGCGTKVEIKSGGGGSQVQLVQSGAEVKKPGASVKVSCKASGYTFTNYWMNWVRQAPGQCLEWMGNIAYGVKGTNYNQKFQGRVTMTVDTSSSTAYMELSRLRSDDTAVYYCATRYFYVMDYWGQGTLVTVSSGGGGSGGGGSGGGGSDIQMTQSPSSLSASVGDRVTITCRASQDISNYLNWYQQKPGKVPKLLIYYTSRLHSGVPSRFSGSGSGTDFTLTISSLQPEDVATYYCVQYAQFPLTFGCGTKVEIKSGGGGSEVQLVESGGGLVQPGGSLKLSCAASGFTFNKYAMNWVRQAPGKGLEWVARIRSKYNNYATYYADSVKDRFTISRDDSKNTAYLQMNNLKTEDTAVYYCVRHGNFGNSYISYWAYWGQGTLVTVSSGGGGSGGGGSGGGGSQTVVTQEPSLTVSPGGTVTLTCGSSTGAVTSGNYPNWVQQKPGQAPRGLIGGTKFLAPGTPARFSGSLLGGKAALTLSGVQPEDEAEYYCVLWYSNRWVFGGGTKLTVLGGGGDKTHTCPPCPAPELLGGPSVFLFPPKPKDTLMISRTPEVTCVVVDVSHEDPEVKFNWYVDGVEVHNAKTKPCEEQYGSTYRCVSVLTVLHQDWLNGKEYKCKVSNKALPAPIEKTISKAKGQPREPQVYTLPPSREEMTKNQVSLTCLVKGFYPSDIAVEWESNGQPENNYKTTPPVLDSDGSFFLYSKLTVDKSRWQQGNVFSCSVMHEALHNHYTQKSLSLSPGKGGGGSGGGGSGGGGSGGGGSGGGGSGGGGSDKTHTCPPCPAPELLGGPSVFLFPPKPKDTLMISRTPEVTCVVVDVSHEDPEVKFNWYVDGVEVHNAKTKPCEEQYGSTYRCVSVLTVLHQDWLNGKEYKCKVSNKALPAPIEKTISKAKGQPREPQVYTLPPSREEMTKNQVSLTCLVKGFYPSDIAVEWESNGQPENNYKTTPPVLDSDGSFFLYSKLTVDKSRWQQGNVFSCSVMHEALHNHYTQKSLSLSPGK

SEQ ID NO: 3655 - protein, 509 aa, Artificial Sequence
  Synthetic
EVQLLESGGGLVQPGGSLRLSCAASGFTFSSYAMSWVRQAPGKCLEWVSAISGSGGSTYYAIDVKGRFTISRDNSKNTLYLQMNSLRAEDTAVYYCAKEGYYPGSGYPLYYYFGMDVWGQGTTVTVSSGGGGSGGGGSGGGGSEIVLTQSPGTLSLSPGERATLSCRASQSVSSSYLAWYQQKPGQAPRLLIYGASSRATGIPDRFSGSGSGTDFTLTISRLEPEDFAVYYCQQYGSSPIFTFGCGTKVEIKSGGGGSEVQLLESGGGLVQPGGSLRLSCAASGFSFSSYPINWVRQAPGKCLEWVGVIWTGGGTNYASSVKGRFTISRDNSKNTVYLQMNSLRAEDTAVYYCAKSRGVYDFKGRGAMDYWGQGTLVTVSSGGGGSGGGGSGGGGSDIVMTQSPDSLAVSLGERATINCKSSQSLLYSSNQKNYFAWYQQKPGQPPKLLIYWASTRESGVPDRFSGSGSGTDFTLTISSLQAEDVAVYYCQQYYSYPYTFGCGTKLEIK

SEQ ID NO: 3656 - protein, 764 aa, Artificial Sequence
  Synthetic
EVQLLESGGGLVQPGGSLRLSCAASGFTFSSYAMSWVRQAPGKCLEWVSAISGSGGSTYYAIDVKGRFTISRDNSKNTLYLQMNSLRAEDTAVYYCAKEGYYPGSGYPLYYYFGMDVWGQGTTVTVSSGGGGSGGGGSGGGGSEIVLTQSPGTLSLSPGERATLSCRASQSVSSSYLAWYQQKPGQAPRLLIYGASSRATGIPDRFSGSGSGTDFTLTISRLEPEDFAVYYCQQYGSSPIFTFGCGTKVEIKSGGGGSEVQLLESGGGLVQPGGSLRLSCAASGFSFSSYPINWVRQAPGKCLEWVGVIWTGGGTNYASSVKGRFTISRDNSKNTVYLQMNSLRAEDTAVYYCAKSRGVYDFKGRGAMDYWGQGTLVTVSSGGGGSGGGGSGGGGSDIVMTQSPDSLAVSLGERATINCKSSQSLLYSSNQKNYFAWYQQKPGQPPKLLIYWASTRESGVPDRFSGSGSGTDFTLTISSLQAEDVAVYYCQQYYSYPYTFGCGTKLEIKSGGGGSEVQLVESGGGLVQPGGSLKLSCAASGFTFNKYAMNWVRQAPGKGLEWVARIRSKYNNYATYYADSVKDRFTISRDDSKNTAYLQMNNLKTEDTAVYYCVRHGNFGNSYISYWAYWGQGTLVTVSSGGGGSGGGGSGGGGSQTVVTQEPSLTVSPGGTVTLTCGSSTGAVTSGNYPNWVQQKPGQAPRGLIGGTKFLAPGTPARFSGSLLGGKAALTLSGVQPEDEAEYYCVLWYSNRWVFGGGTKLTVL

SEQ ID NO: 3657 - protein, 1252 aa, Artificial Sequence
  Synthetic
EVQLLESGGGLVQPGGSLRLSCAASGFTFSSYAMSWVRQAPGKCLEWVSAISGSGGSTYYAIDVKGRFTISRDNSKNTLYLQMNSLRAEDTAVYYCAKEGYYPGSGYPLYYYFGMDVWGQGTTVTVSSGGGGSGGGGSGGGGSEIVLTQSPGTLSLSPGERATLSCRASQSVSSSYLAWYQQKPGQAPRLLIYGASSRATGIPDRFSGSGSGTDFTLTISRLEPEDFAVYYCQQYGSSPIFTFGCGTKVEIKSGGGGSEVQLLESGGGLVQPGGSLRLSCAASGFSFSSYPINWVRQAPGKCLEWVGVIWTGGGTNYASSVKGRFTISRDNSKNTVYLQMNSLRAEDTAVYYCAKSRGVYDFKGRGAMDYWGQGTLVTVSSGGGGSGGGGSGGGGSDIVMTQSPDSLAVSLGERATINCKSSQSLLYSSNQKNYFAWYQQKPGQPPKLLIYWASTRESGVPDRFSGSGSGTDFTLTISSLQAEDVAVYYCQQYYSYPYTFGCGTKLEIKSGGGGSEVQLVESGGGLVQPGGSLKLSCAASGFTFNKYAMNWVRQAPGKGLEWVARIRSKYNNYATYYADSVKDRFTISRDDSKNTAYLQMNNLKTEDTAVYYCVRHGNFGNSYISYWAYWGQGTLVTVSSGGGGSGGGGSGGGGSQTVVTQEPSLTVSPGGTVTLTCGSSTGAVTSGNYPNWVQQKPGQAPRGLIGGTKFLAPGTPARFSGSLLGGKAALTLSGVQPEDEAEYYCVLWYSNRWVFGGGTKLTVLGGGGDKTHTCPPCPAPELLGGPSVFLFPPKPKDTLMISRTPEVTCVVVDVSHEDPEVKFNWYVDGVEVHNAKTKPCEEQYGSTYRCVSVLTVLHQDWLNGKEYKCKVSNKALPAPIEKTISKAKGQPREPQVYTLPPSREEMTKNQVSLTCLVKGFYPSDIAVEWESNGQPENNYKTTPPVLDSDGSFFLYSKLTVDKSRWQQGNVFSCSVMHEALHNHYTQKSLSLSPGKGGGGSGGGGSGGGGSGGGGSGGGGSGGGGSDKTHTCPPCPAPELLGGPSVFLFPPKPKDTLMISRTPEVTCVVVDVSHEDPEVKFNWYVDGVEVHNAKTKPCEEQYGSTYRCVSVLTVLHQDWLNGKEYKCKVSNKALPAPIEKTISKAKGQPREPQVYTLPPSREEMTKNQVSLTCLVKGFYPSDIAVEWESNGQPENNYKTTPPVLDSDGSFFLYSKLTVDKSRWQQGNVFSCSVMHEALHNHYTQKSLSLSPGK

SEQ ID NO: 3658 - protein, 510 aa, Artificial Sequence
  Synthetic
QVQLVESGGGVVQPGRSLRLSCAASGFTFSSYGMGWVRQAPGKCLEWVAVISYHGSNKYYADAVKGRFTISRDNSKNTLYLQMNSLRAEDTAVYYCAREGAHFGSGSYYPLYYYYAMDVWGQGTTVTVSSGGGGSGGGGSGGGGSEIVTQSPGTLSLSPGERATLSCRASQSVSSSYLAWYQQKPGQAPRLLIYGASIRATGIPDRFSGSGSGTDFTLTISRLEPEDFAVYYCQQTGSSPIFTFGCGTKVEIKSGGGGSEVQLLESGGGLVQPGGSLRLSCAASGFSFSSYPINWVRQAPGKCLEWVGVIWTGGGTNYASSVKGRFTISRDNSKNTVYLQMNSLRAEDTAVYYCAKSRGVYDFKGRGAMDYWGQGTLVTVSSGGGGSGGGGSGGGGSDIVMTQSPDSLAVSLGERATINCKSSQSLLYSSNQKNYFAWYQQKPGQPPKLLIYWASTRESGVPDRFSGSGSGTDFTLTISSLQAEDVAVYYCQQYYSYPYTFGCGTKLEIK

SEQ ID NO: 3659 - protein, 765 aa, Artificial Sequence
  Synthetic
QVQLVESGGGVVQPGRSLRLSCAASGFTFSSYGMGWVRQAPGKCLEWVAVISYHGSNKYYADAVKGRFTISRDNSKNTLYLQMNSLRAEDTAVYYCAREGAHFGSGSYYPLYYYYAMDVWGQGTTVTVSSGGGGSGGGGSGGGGSEIVTQSPGTLSLSPGERATLSCRASQSVSSSYLAWYQQKPGQAPRLLIYGASIRATGIPDRFSGSGSGTDFTLTISRLEPEDFAVYYCQQTGSSPIFTFGCGTKVEIKSGGGGSEVQLLESGGGLVQPGGSLRLSCAASGFSFSSYPINWVRQAPGKCLEWVGVIWTGGGTNYASSVKGRFTISRDNSKNTVYLQMNSLRAEDTAVYYCAKSRGVYDFKGRGAMDYWGQGTLVTVSSGGGGSGGGGSGGGGSDIVMTQSPDSLAVSLGERATINCKSSQSLLYSSNQKNYFAWYQQKPGQPPKLLIYWASTRESGVPDRFSGSGSGTDFTLTISSLQAEDVAVYYCQQYYSYPYTFGCGTKLEIKSGGGGSEVQLVESGGGLVQPGGSLKLSCAASGFTFNKYAMNWVRQAPGKGLEWVARIRSKYNNYATYYADSVKDRFTISRDDSKNTAYLQMNNLKTEDTAVYYCVRHGNFGNSYISYWAYWGQGTLVTVSSGGGGSGGGGSGGGGSQTVVTQEPSLTVSPGGTVTLTCGSSTGAVTSGNYPNWVQQKPGQAPRGLIGGTKFLAPGTPARFSGSLLGGKAALTLSGVQPEDEAEYYCVLWYSNRWVFGGGTKLTVL

SEQ ID NO: 3660 - protein, 1253 aa, Artificial Sequence
  Synthetic
QVQLVESGGGVVQPGRSLRLSCAASGFTFSSYGMGWVRQAPGKCLEWVAVISYHGSNKYYADAVKGRFTISRDNSKNTLYLQMNSLRAEDTAVYYCAREGAHFGSGSYYPLYYYYAMDVWGQGTTVTVSSGGGGSGGGGSGGGGSEIVTQSPGTLSLSPGERATLSCRASQSVSSSYLAWYQQKPGQAPRLLIYGASIRATGIPDRFSGSGSGTDFTLTISRLEPEDFAVYYCQQTGSSPIFTFGCGTKVEIKSGGGGSEVQLLESGGGLVQPGGSLRLSCAASGFSFSSYPINWVRQAPGKCLEWVGVIWTGGGTNYASSVKGRFTISRDNSKNTVYLQMNSLRAEDTAVYYCAKSRGVYDFKGRGAMDYWGQGTLVTVSSGGGGSGGGGSGGGGSDIVMTQSPDSLAVSLGERATINCKSSQSLLYSSNQKNYFAWYQQKPGQPPKLLIYWASTRESGVPDRFSGSGSGTDFTLTISSLQAEDVAVYYCQQYYSYPYTFGCGTKLEIKSGGGGSEVQLVESGGGLVQPGGSLKLSCAASGFTFNKYAMNWVRQAPGKGLEWVARIRSKYNNYATYYADSVKDRFTISRDDSKNTAYLQMNNLKTEDTAVYYCVRHGNFGNSYISYWAYWGQGTLVTVSSGGGGSGGGGSGGGGSQTVVTQEPSLTVSPGGTVTLTCGSSTGAVTSGNYPNWVQQKPGQAPRGLIGGTKFLAPGTPARFSGSLLGGKAALTLSGVQPEDEAEYYCVLWYSNRWVFGGGTKLTVLGGGGDKTHTCPPCPAPELLGGPSVFLFPPKPKDTLMISRTPEVTCVVVDVSHEDPEVKFNWYVDGVEVHNAKTKPCEEQYGSTYRCVSVLTVLHQDWLNGKEYKCKVSNKALPAPIEKTISKAKGQPREPQVYTLPPSREEMTKNQVSLTCLVKGFYPSDIAVEWESNGQPENNYKTTPPVLDSDGSFFLYSKLTVDKSRWQQGNVFSCSVMHEALHNHYTQKSLSLSPGKGGGGSGGGGSGGGGSGGGGSGGGGSGGGGSDKTHTCPPCPAPELLGGPSVFLFPPKPKDTLMISRTPEVTCVVVDVSHEDPEVKFNWYVDGVEVHNAKTKPCEEQYGSTYRCVSVLTVLHQDWLNGKEYKCKVSNKALPAPIEKTISKAKGQPREPQVYTLPPSREEMTKNQVSLTCLVKGFYPSDIAVEWESNGQPENNYKTTPPVLDSDGSFFLYSKLTVDKSRWQQGNVFSCSVMHEALHNHYTQKSLSLSPGK

SEQ ID NO: 3661 - protein, 504 aa, Artificial Sequence
  Synthetic
QVQLVQSGAEVKKPGASVKVSCKASGYTFTGYYIHWVRQAPGQCLEWMGWINPNSGGTNYAQKFQGRVTMTRDTSISTAYMELSRLRSDDTAVYYCARVEAVAGREYYYFSGMDVWGQGTTVTVSSGGGGSGGGGSGGGGSSYELTQPPSVSVSPGQTASITCSGEKLGDKYVYWYQQKPGQSPVLVIYQSTKRPSGVPERFSGSNSGNTATLTISGTQAMDEADYYCQAYHASTAVFGCGTKLTVLSGGGGSEVQLLESGGGLVQPGGSLRLSCAASGFSFSSYPINWVRQAPGKCLEWVGVIWTGGGTNYASSVKGRFTISRDNSKNTVYLQMNSLRAEDTAVYYCAKSRGVYDFKGRGAMDYWGQGTLVTVSSGGGGSGGGGSGGGGSDIVMTQSPDSLAVSLGERATINCKSSQSLLYSSNQKNYFAWYQQKPGQPPKLLIYWASTRESGVPDRFSGSGSGTDFTLTISSLQAEDVAVYYCQQYYSYPYTFGCGTKLEIK

SEQ ID NO: 3662 - protein, 759 aa, Artificial Sequence
  Synthetic
QVQLVQSGAEVKKPGASVKVSCKASGYTFTGYYIHWVRQAPGQCLEWMGWINPNSGGTNYAQKFQGRVTMTRDTSISTAYMELSRLRSDDTAVYYCARVEAVAGREYYYFSGMDVWGQGTTVTVSSGGGGSGGGGSGGGGSSYELTQPPSVSVSPGQTASITCSGEKLGDKYVYWYQQKPGQSPVLVIYQSTKRPSGVPERFSGSNSGNTATLTISGTQAMDEADYYCQAYHASTAVFGCGTKLTVLSGGGGSEVQLLESGGGLVQPGGSLRLSCAASGFSFSSYPINWVRQAPGKCLEWVGVIWTGGGTNYASSVKGRFTISRDNSKNTVYLQMNSLRAEDTAVYYCAKSRGVYDFKGRGAMDYWGQGTLVTVSSGGGGSGGGGSGGGGSDIVMTQSPDSLAVSLGERATINCKSSQSLLYSSNQKNYFAWYQQKPGQPPKLLIYWASTRESGVPDRFSGSGSGTDFTLTISSLQAEDVAVYYCQQYYSYPYTFGCGTKLEIKSGGGGSEVQLVESGGGLVQPGGSLKLSCAASGFTFNKYAMNWVRQAPGKGLEWVARIRSKYNNYATYYADSVKDRFTISRDDSKNTAYLQMNNLKTEDTAVYYCVRHGNFGNSYISYWAYWGQGTLVTVSSGGGGSGGGGSGGGGSQTVVTQEPSLTVSPGGTVTLTCGSSTGAVTSGNYPNWVQQKPGQAPRGLIGGTKFLAPGTPARFSGSLLGGKAALTLSGVQPEDEAEYYCVLWYSNRWVFGGGTKLTVL

SEQ ID NO: 3663 - protein, 1247 aa, Artificial Sequence
  Synthetic
QVQLVQSGAEVKKPGASVKVSCKASGYTFTGYYIHWVRQAPGQCLEWMGWINPNSGGTNYAQKFQGRVTMTRDTSISTAYMELSRLRSDDTAVYYCARVEAVAGREYYYFSGMDVWGQGTTVTVSSGGGGSGGGGSGGGGSSYELTQPPSVSVSPGQTASITCSGEKLGDKYVYWYQQKPGQSPVLVIYQSTKRPSGVPERFSGSNSGNTATLTISGTQAMDEADYYCQAYHASTAVFGCGTKLTVLSGGGGSEVQLLESGGGLVQPGGSLRLSCAASGFSFSSYPINWVRQAPGKCLEWVGVIWTGGGTNYASSVKGRFTISRDNSKNTVYLQMNSLRAEDTAVYYCAKSRGVYDFKGRGAMDYWGQGTLVTVSSGGGGSGGGGSGGGGSDIVMTQSPDSLAVSLGERATINCKSSQSLLYSSNQKNYFAWYQQKPGQPPKLLIYWASTRESGVPDRFSGSGSGTDFTLTISSLQAEDVAVYYCQQYYSYPYTFGCGTKLEIKSGGGGSEVQLVESGGGLVQPGGSLKLSCAASGFTFNKYAMNWVRQAPGKGLEWVARIRSKYNNYATYYADSVKDRFTISRDDSKNTAYLQMNNLKTEDTAVYYCVRHGNFGNSYISYWAYWGQGTLVTVSSGGGGSGGGGSGGGGSQTVVTQEPSLTVSPGGTVTLTCGSSTGAVTSGNYPNWVQQKPGQAPRGLIGGTKFLAPGTPARFSGSLLGGKAALTLSGVQPEDEAEYYCVLWYSNRWVFGGGTKLTVLGGGGDKTHTCPPCPAPELLGGPSVFLFPPKPKDTLMISRTPEVTCVVVDVSHEDPEVKFNWYVDGVEVHNAKTKPCEEQYGSTYRCVSVLTVLHQDWLNGKEYKCKVSNKALPAPIEKTISKAKGQPREPQVYTLPPSREEMTKNQVSLTCLVKGFYPSDIAVEWESNGQPENNYKTTPPVLDSDGSFFLYSKLTVDKSRWQQGNVFSCSVMHEALHNHYTQKSLSLSPGKGGGGSGGGGSGGGGSGGGGSGGGGSGGGGSDKTHTCPPCPAPELLGGPSVFLFPPKPKDTLMISRTPEVTCVVVDVSHEDPEVKFNWYVDGVEVHNAKTKPCEEQYGSTYRCVSVLTVLHQDWLNGKEYKCKVSNKALPAPIEKTISKAKGQPREPQVYTLPPSREEMTKNQVSLTCLVKGFYPSDIAVEWESNGQPENNYKTTPPVLDSDGSFFLYSKLTVDKSRWQQGNVFSCSVMHEALHNHYTQKSLSLSPGK

SEQ ID NO: 3664 - protein, 491 aa, Artificial Sequence
  Synthetic
QVQLVQSGAEVKKPGASVKVSCKASGYTFTGYYIHWVRQAPGQCLEWMGWINPNSGGTNYAQKFQGRVTMTRDTSISTAYMELSRLRSDDTAVYYCARVEAVAGREYYYFSGMDVWGQGTTVTVSSGGGGSGGGGSGGGGSSYELTQPPSVSVSPGQTASITCSGEKLGDKYVYWYQQKPGQSPVLVIYQSTKRPSGVPERFSGSNSGNTATLTISGTQAMDEADYYCQAYHASTAVFGCGTKLTVLSGGGGSEVQLLESGGGLVQPGGSLRLSCAASGFTFSSYWMHWVRQTPGKCLEWVSKIDPSDDYTNYNQKVKGRFTISIDKSKNTLYLQMNSLRAEDTAVYYCARWDYNYFDVWGQGTTVTVSSGGGGSGGGGSGGGGSEIVMTQSPATLSVSPGERATLTCRASSSVSYMHWYQQKPGQAPRLLIYGTSNLVSGVPARFSGSGSGTEFTLTISSLQSEDFAVYYCQQWSSYPLTFGCGTKVEIK

SEQ ID NO: 3665 - protein, 746 aa, Artificial Sequence
  Synthetic
QVQLVQSGAEVKKPGASVKVSCKASGYTFTGYYIHWVRQAPGQCLEWMGWINPNSGGTNYAQKFQGRVTMTRDTSISTAYMELSRLRSDDTAVYYCARVEAVAGREYYYFSGMDVWGQGTTVTVSSGGGGSGGGGSGGGGSSYELTQPPSVSVSPGQTASITCSGEKLGDKYVYWYQQKPGQSPVLVIYQSTKRPSGVPERFSGSNSGNTATLTISGTQAMDEADYYCQAYHASTAVFGCGTKLTVLSGGGGSEVQLLESGGGLVQPGGSLRLSCAASGFTFSSYWMHWVRQTPGKCLEWVSKIDPSDDYTNYNQKVKGRFTISIDKSKNTLYLQMNSLRAEDTAVYYCARWDYNYFDVWGQGTTVTVSSGGGGSGGGGSGGGGSEIVMTQSPATLSVSPGERATLTCRASSSVSYMHWYQQKPGQAPRLLIYGTSNLVSGVPARFSGSGSGTEFTLTISSLQSEDFAVYYCQQWSSYPLTFGCGTKVEIKSGGGGSEVQLVESGGGLVQPGGSLKLSCAASGFTFNKYAMNWVRQAPGKGLEWVARIRSKYNNYATYYADSVKDRFTISRDDSKNTAYLQMNNLKTEDTAVYYCVRHGNFGNSYISYWAYWGQGTLVTVSSGGGGSGGGGSGGGGSQTVVTQEPSLTVSPGGTVTLTCGSSTGAVTSGNYPNWVQQKPGQAPRGLIGGTKFLAPGTPARFSGSLLGGKAALTLSGVQPEDEAEYYCVLWYSNRWVFGGGTKLTVL

SEQ ID NO: 3666 - protein, 1234 aa, Artificial Sequence
  Synthetic
QVQLVQSGAEVKKPGASVKVSCKASGYTFTGYYIHWVRQAPGQCLEWMGWINPNSGGTNYAQKFQGRVTMTRDTSISTAYMELSRLRSDDTAVYYCARVEAVAGREYYYFSGMDVWGQGTTVTVSSGGGGSGGGGSGGGGSSYELTQPPSVSVSPGQTASITCSGEKLGDKYVYWYQQKPGQSPVLVIYQSTKRPSGVPERFSGSNSGNTATLTISGTQAMDEADYYCQAYHASTAVFGCGTKLTVLSGGGGSEVQLLESGGGLVQPGGSLRLSCAASGFTFSSYWMHWVRQTPGKCLEWVSKIDPSDDYTNYNQKVKGRFTISIDKSKNTLYLQMNSLRAEDTAVYYCARWDYNYFDVWGQGTTVTVSSGGGGSGGGGSGGGGSEIVMTQSPATLSVSPGERATLTCRASSSVSYMHWYQQKPGQAPRLLIYGTSNLVSGVPARFSGSGSGTEFTLTISSLQSEDFAVYYCQQWSSYPLTFGCGTKVEIKSGGGGSEVQLVESGGGLVQPGGSLKLSCAASGFTFNKYAMNWVRQAPGKGLEWVARIRSKYNNYATYYADSVKDRFTISRDDSKNTAYLQMNNLKTEDTAVYYCVRHGNFGNSYISYWAYWGQGTLVTVSSGGGGSGGGGSGGGGSQTVVTQEPSLTVSPGGTVTLTCGSSTGAVTSGNYPNWVQQKPGQAPRGLIGGTKFLAPGTPARFSGSLLGGKAALTLSGVQPEDEAEYYCVLWYSNRWVFGGGTKLTVLGGGGDKTHTCPPCPAPELLGGPSVFLFPPKPKDTLMISRTPEVTCVVVDVSHEDPEVKFNWYVDGVEVHNAKTKPCEEQYGSTYRCVSVLTVLHQDWLNGKEYKCKVSNKALPAPIEKTISKAKGQPREPQVYTLPPSREEMTKNQVSLTCLVKGFYPSDIAVEWESNGQPENNYKTTPPVLDSDGSFFLYSKLTVDKSRWQQGNVFSCSVMHEALHNHYTQKSLSLSPGKGGGGSGGGGSGGGGSGGGGSGGGGSGGGGSDKTHTCPPCPAPELLGGPSVFLFPPKPKDTLMISRTPEVTCVVVDVSHEDPEVKFNWYVDGVEVHNAKTKPCEEQYGSTYRCVSVLTVLHQDWLNGKEYKCKVSNKALPAPIEKTISKAKGQPREPQVYTLPPSREEMTKNQVSLTCLVKGFYPSDIAVEWESNGQPENNYKTTPPVLDSDGSFFLYSKLTVDKSRWQQGNVFSCSVMHEALHNHYTQKSLSLSPGK

SEQ ID NO: 3667 - protein, 492 aa, Artificial Sequence
  Synthetic
QVQLVQSGAEVKKPGASVKVSCKASGYTFTGYYIHWVRQAPGQCLEWMGWINPNSGGTNYAQKFQGRVTMTRDTSISTAYMELSRLRSDDTAVYYCARVEAVAGREYYYFSGMDVWGQGTTVTVSSGGGGSGGGGSGGGGSSYELTQPPSVSVSPGQTASITCSGEKLGDKYVYWYQQKPGQSPVLVIYQSTKRPSGVPERFSGSNSGNTATLTISGTQAMDEADYYCQAYHASTAVFGCGTKLTVLSGGGGSQVQLVQSGAEVKKPGASVKVSCKASGYTFTNYWMNWVRQAPGQCLEWMGNIHSKAHGTNYNQKFQGRVTMTVDTSSSTAYMELSRLRSDDTAVYYCATRYFYVMDYWGQGTLVTVSSGGGGSGGGGSGGGGSDIQMTQSPSSLSASVGDRVTITCRASQDISNYLNWYQQKPGKVPKLLIYYTSRLHSGVPSRFSGSGSGTDFTLTISSLQPEDVATYYCVQYAQFPLTFGCGTKVEIK

SEQ ID NO: 3668 - protein, 747 aa, Artificial Sequence
  Synthetic
QVQLVQSGAEVKKPGASVKVSCKASGYTFTGYYIHWVRQAPGQCLEWMGWINPNSGGTNYAQKFQGRVTMTRDTSISTAYMELSRLRSDDTAVYYCARVEAVAGREYYYFSGMDVWGQGTTVTVSSGGGGSGGGGSGGGGSSYELTQPPSVSVSPGQTASITCSGEKLGDKYVYWYQQKPGQSPVLVIYQSTKRPSGVPERFSGSNSGNTATLTISGTQAMDEADYYCQAYHASTAVFGCGTKLTVLSGGGGSQVQLVQSGAEVKKPGASVKVSCKASGYTFTNYWMNWVRQAPGQCLEWMGNIHSKAHGTNYNQKFQGRVTMTVDTSSSTAYMELSRLRSDDTAVYYCATRYFYVMDYWGQGTLVTVSSGGGGSGGGGSGGGGSDIQMTQSPSSLSASVGDRVTITCRASQDISNYLNWYQQKPGKVPKLLIYYTSRLHSGVPSRFSGSGSGTDFTLTISSLQPEDVATYYCVQYAQFPLTFGCGTKVEIKSGGGGSEVQLVESGGGLVQPGGSLKLSCAASGFTFNKYAMNWVRQAPGKGLEWVARIRSKYNNYATYYADSVKDRFTISRDDSKNTAYLQMNNLKTEDTAVYYCVRHGNFGNSYISYWAYWGQGTLVTVSSGGGGSGGGGSGGGGSQTVVTQEPSLTVSPGGTVTLTCGSSTGAVTSGNYPNWVQQKPGQAPRGLIGGTKFLAPGTPARFSGSLLGGKAALTLSGVQPEDEAEYYCVLWYSNRWVFGGGTKLTVL

SEQ ID NO: 3669 - protein, 1235 aa, Artificial Sequence
  Synthetic
QVQLVQSGAEVKKPGASVKVSCKASGYTFTGYYIHWVRQAPGQCLEWMGWINPNSGGTNYAQKFQGRVTMTRDTSISTAYMELSRLRSDDTAVYYCARVEAVAGREYYYFSGMDVWGQGTTVTVSSGGGGSGGGGSGGGGSSYELTQPPSVSVSPGQTASITCSGEKLGDKYVYWYQQKPGQSPVLVIYQSTKRPSGVPERFSGSNSGNTATLTISGTQAMDEADYYCQAYHASTAVFGCGTKLTVLSGGGGSQVQLVQSGAEVKKPGASVKVSCKASGYTFTNYWMNWVRQAPGQCLEWMGNIHSKAHGTNYNQKFQGRVTMTVDTSSSTAYMELSRLRSDDTAVYYCATRYFYVMDYWGQGTLVTVSSGGGGSGGGGSGGGGSDIQMTQSPSSLSASVGDRVTITCRASQDISNYLNWYQQKPGKVPKLLIYYTSRLHSGVPSRFSGSGSGTDFTLTISSLQPEDVATYYCVQYAQFPLTFGCGTKVEIKSGGGGSEVQLVESGGGLVQPGGSLKLSCAASGFTFNKYAMNWVRQAPGKGLEWVARIRSKYNNYATYYADSVKDRFTISRDDSKNTAYLQMNNLKTEDTAVYYCVRHGNFGNSYISYWAYWGQGTLVTVSSGGGGSGGGGSGGGGSQTVVTQEPSLTVSPGGTVTLTCGSSTGAVTSGNYPNWVQQKPGQAPRGLIGGTKFLAPGTPARFSGSLLGGKAALTLSGVQPEDEAEYYCVLWYSNRWVFGGGTKLTVLGGGGDKTHTCPPCPAPELLGGPSVFLFPPKPKDTLMISRTPEVTCVVVDVSHEDPEVKFNWYVDGVEVHNAKTKPCEEQYGSTYRCVSVLTVLHQDWLNGKEYKCKVSNKALPAPIEKTISKAKGQPREPQVYTLPPSREEMTKNQVSLTCLVKGFYPSDIAVEWESNGQPENNYKTTPPVLDSDGSFFLYSKLTVDKSRWQQGNVFSCSVMHEALHNHYTQKSLSLSPGKGGGGSGGGGSGGGGSGGGGSGGGGSGGGGSDKTHTCPPCPAPELLGGPSVFLFPPKPKDTLMISRTPEVTCVVVDVSHEDPEVKFNWYVDGVEVHNAKTKPCEEQYGSTYRCVSVLTVLHQDWLNGKEYKCKVSNKALPAPIEKTISKAKGQPREPQVYTLPPSREEMTKNQVSLTCLVKGFYPSDIAVEWESNGQPENNYKTTPPVLDSDGSFFLYSKLTVDKSRWQQGNVFSCSVMHEALHNHYTQKSLSLSPGK

SEQ ID NO: 3670 - protein, 491 aa, Artificial Sequence
  Synthetic
QVQLVQSGAEVKKPGASVKVSCKASGYTFTGYYIHWVRQAPGQCLEWMGWINPNSGGTNYAQKFQGRVTMTRDTSISTAYMELSRLRSDDTAVYYCARVEAVAGREYYYFSGMDVWGQGTTVTVSSGGGGSGGGGSGGGGSSYELTQPPSVSVSPGQTASITCSGEKLGDKYVYWYQQKPGQSPVLVIYQSTKRPSGVPERFSGSNSGNTATLTISGTQAMDEADYYCQAYHASTAVFGCGTKLTVLSGGGGSEVQLLESGGGLVQPGGSVRLSCAASGFTFSSYWMYWVRQAPGKCLEWVSKIDPSDDYTNYNQKVKGRFTISIDNSKNTLYLQMNSLRAEDSAVYYCARWDYTHFDVWGQGTTVTVSSGGGGSGGGGSGGGGSEIVMTQSPATLSVSPGERATLSCRASSSVSYMHWYQQKPGQAPRLLIYGTSNLASGVPVRFSGSGSGTEFTLTISRLQSEDVAVYYCQQWSSYPLTFGCGTKVEIK

SEQ ID NO: 3671 - protein, 746 aa, Artificial Sequence
  Synthetic
QVQLVQSGAEVKKPGASVKVSCKASGYTFTGYYIHWVRQAPGQCLEWMGWINPNSGGTNYAQKFQGRVTMTRDTSISTAYMELSRLRSDDTAVYYCARVEAVAGREYYYFSGMDVWGQGTTVTVSSGGGGSGGGGSGGGGSSYELTQPPSVSVSPGQTASITCSGEKLGDKYVYWYQQKPGQSPVLVIYQSTKRPSGVPERFSGSNSGNTATLTISGTQAMDEADYYCQAYHASTAVFGCGTKLTVLSGGGGSEVQLLESGGGLVQPGGSVRLSCAASGFTFSSYWMYWVRQAPGKCLEWVSKIDPSDDYTNYNQKVKGRFTISIDNSKNTLYLQMNSLRAEDSAVYYCARWDYTHFDVWGQGTTVTVSSGGGGSGGGGSGGGGSEIVMTQSPATLSVSPGERATLSCRASSSVSYMHWYQQKPGQAPRLLIYGTSNLASGVPVRFSGSGSGTEFTLTISRLQSEDVAVYYCQQWSSYPLTFGCGTKVEIKSGGGGSEVQLVESGGGLVQPGGSLKLSCAASGFTFNKYAMNWVRQAPGKGLEWVARIRSKYNNYATYYADSVKDRFTISRDDSKNTAYLQMNNLKTEDTAVYYCVRHGNFGNSYISYWAYWGQGTLVTVSSGGGGSGGGGSGGGGSQTVVTQEPSLTVSPGGTVTLTCGSSTGAVTSGNYPNWVQQKPGQAPRGLIGGTKFLAPGTPARFSGSLLGGKAALTLSGVQPEDEAEYYCVLWYSNRWVFGGGTKLTVL

SEQ ID NO: 3672 - protein, 1234 aa, Artificial Sequence
  Synthetic
QVQLVQSGAEVKKPGASVKVSCKASGYTFTGYYIHWVRQAPGQCLEWMGWINPNSGGTNYAQKFQGRVTMTRDTSISTAYMELSRLRSDDTAVYYCARVEAVAGREYYYFSGMDVWGQGTTVTVSSGGGGSGGGGSGGGGSSYELTQPPSVSVSPGQTASITCSGEKLGDKYVYWYQQKPGQSPVLVIYQSTKRPSGVPERFSGSNSGNTATLTISGTQAMDEADYYCQAYHASTAVFGCGTKLTVLSGGGGSEVQLLESGGGLVQPGGSVRLSCAASGFTFSSYWMYWVRQAPGKCLEWVSKIDPSDDYTNYNQKVKGRFTISIDNSKNTLYLQMNSLRAEDSAVYYCARWDYTHFDVWGQGTTVTVSSGGGGSGGGGSGGGGSEIVMTQSPATLSVSPGERATLSCRASSSVSYMHWYQQKPGQAPRLLIYGTSNLASGVPVRFSGSGSGTEFTLTISRLQSEDVAVYYCQQWSSYPLTFGCGTKVEIKSGGGGSEVQLVESGGGLVQPGGSLKLSCAASGFTFNKYAMNWVRQAPGKGLEWVARIRSKYNNYATYYADSVKDRFTISRDDSKNTAYLQMNNLKTEDTAVYYCVRHGNFGNSYISYWAYWGQGTLVTVSSGGGGSGGGGSGGGGSQTVVTQEPSLTVSPGGTVTLTCGSSTGAVTSGNYPNWVQQKPGQAPRGLIGGTKFLAPGTPARFSGSLLGGKAALTLSGVQPEDEAEYYCVLWYSNRWVFGGGTKLTVLGGGGDKTHTCPPCPAPELLGGPSVFLFPPKPKDTLMISRTPEVTCVVVDVSHEDPEVKFNWYVDGVEVHNAKTKPCEEQYGSTYRCVSVLTVLHQDWLNGKEYKCKVSNKALPAPIEKTISKAKGQPREPQVYTLPPSREEMTKNQVSLTCLVKGFYPSDIAVEWESNGQPENNYKTTPPVLDSDGSFFLYSKLTVDKSRWQQGNVFSCSVMHEALHNHYTQKSLSLSPGKGGGGSGGGGSGGGGSGGGGSGGGGSGGGGSDKTHTCPPCPAPELLGGPSVFLFPPKPKDTLMISRTPEVTCVVVDVSHEDPEVKFNWYVDGVEVHNAKTKPCEEQYGSTYRCVSVLTVLHQDWLNGKEYKCKVSNKALPAPIEKTISKAKGQPREPQVYTLPPSREEMTKNQVSLTCLVKGFYPSDIAVEWESNGQPENNYKTTPPVLDSDGSFFLYSKLTVDKSRWQQGNVFSCSVMHEALHNHYTQKSLSLSPGK

SEQ ID NO: 3673 - protein, 491 aa, Artificial Sequence
  Synthetic
QVQLVQSGAEVKKPGASVKVSCKASGYTFTGYYIHWVRQAPGQCLEWMGWINPNSGGTNYAQKFQGRVTMTRDTSISTAYMELSRLRSDDTAVYYCARVEAVAGREYYYFSGMDVWGQGTTVTVSSGGGGSGGGGSGGGGSSYELTQPPSVSVSPGQTASITCSGEKLGDKYVYWYQQKPGQSPVLVIYQSTKRPSGVPERFSGSNSGNTATLTISGTQAMDEADYYCQAYHASTAVFGCGTKLTVLSGGGGSEVQLLESGGGLVQPGGSLRLSCAASGFTFSSYWMHWVRQTPGKCLEWVSKIDPSDDYTNYNQKVKGRFTISIDKSKNTLYLQMNSLRAEDTAVYYCARWDYSHFDVWGQGTTVTVSSGGGGSGGGGSGGGGSEIVMTQSPATLSVSPGERATLTCRASSSVSYMHWYQQKPGQAPRLLIYGTSNLVSGVPARFSGSGSGTEFTLTISSLQSEDFAVYYCQQWSSYPLTFGCGTKVEIK

SEQ ID NO: 3674 - protein, 746 aa, Artificial Sequence
  Synthetic
QVQLVQSGAEVKKPGASVKVSCKASGYTFTGYYIHWVRQAPGQCLEWMGWINPNSGGTNYAQKFQGRVTMTRDTSISTAYMELSRLRSDDTAVYYCARVEAVAGREYYYFSGMDVWGQGTTVTVSSGGGGSGGGGSGGGGSSYELTQPPSVSVSPGQTASITCSGEKLGDKYVYWYQQKPGQSPVLVIYQSTKRPSGVPERFSGSNSGNTATLTISGTQAMDEADYYCQAYHASTAVFGCGTKLTVLSGGGGSEVQLLESGGGLVQPGGSLRLSCAASGFTFSSYWMHWVRQTPGKCLEWVSKIDPSDDYTNYNQKVKGRFTISIDKSKNTLYLQMNSLRAEDTAVYYCARWDYSHFDVWGQGTTVTVSSGGGGSGGGGSGGGGSEIVMTQSPATLSVSPGERATLTCRASSSVSYMHWYQQKPGQAPRLLIYGTSNLVSGVPARFSGSGSGTEFTLTISSLQSEDFAVYYCQQWSSYPLTFGCGTKVEIKSGGGGSEVQLVESGGGLVQPGGSLKLSCAASGFTFNKYAMNWVRQAPGKGLEWVARIRSKYNNYATYYADSVKDRFTISRDDSKNTAYLQMNNLKTEDTAVYYCVRHGNFGNSYISYWAYWGQGTLVTVSSGGGGSGGGGSGGGGSQTVVTQEPSLTVSPGGTVTLTCGSSTGAVTSGNYPNWVQQKPGQAPRGLIGGTKFLAPGTPARFSGSLLGGKAALTLSGVQPEDEAEYYCVLWYSNRWVFGGGTKLTVL

SEQ ID NO: 3675 - protein, 1234 aa, Artificial Sequence
  Synthetic
QVQLVQSGAEVKKPGASVKVSCKASGYTFTGYYIHWVRQAPGQCLEWMGWINPNSGGTNYAQKFQGRVTMTRDTSISTAYMELSRLRSDDTAVYYCARVEAVAGREYYYFSGMDVWGQGTTVTVSSGGGGSGGGGSGGGGSSYELTQPPSVSVSPGQTASITCSGEKLGDKYVYWYQQKPGQSPVLVIYQSTKRPSGVPERFSGSNSGNTATLTISGTQAMDEADYYCQAYHASTAVFGCGTKLTVLSGGGGSEVQLLESGGGLVQPGGSLRLSCAASGFTFSSYWMHWVRQTPGKCLEWVSKIDPSDDYTNYNQKVKGRFTISIDKSKNTLYLQMNSLRAEDTAVYYCARWDYSHFDVWGQGTTVTVSSGGGGSGGGGSGGGGSEIVMTQSPATLSVSPGERATLTCRASSSVSYMHWYQQKPGQAPRLLIYGTSNLVSGVPARFSGSGSGTEFTLTISSLQSEDFAVYYCQQWSSYPLTFGCGTKVEIKSGGGGSEVQLVESGGGLVQPGGSLKLSCAASGFTFNKYAMNWVRQAPGKGLEWVARIRSKYNNYATYYADSVKDRFTISRDDSKNTAYLQMNNLKTEDTAVYYCVRHGNFGNSYISYWAYWGQGTLVTVSSGGGGSGGGGSGGGGSQTVVTQEPSLTVSPGGTVTLTCGSSTGAVTSGNYPNWVQQKPGQAPRGLIGGTKFLAPGTPARFSGSLLGGKAALTLSGVQPEDEAEYYCVLWYSNRWVFGGGTKLTVLGGGGDKTHTCPPCPAPELLGGPSVFLFPPKPKDTLMISRTPEVTCVVVDVSHEDPEVKFNWYVDGVEVHNAKTKPCEEQYGSTYRCVSVLTVLHQDWLNGKEYKCKVSNKALPAPIEKTISKAKGQPREPQVYTLPPSREEMTKNQVSLTCLVKGFYPSDIAVEWESNGQPENNYKTTPPVLDSDGSFFLYSKLTVDKSRWQQGNVFSCSVMHEALHNHYTQKSLSLSPGKGGGGSGGGGSGGGGSGGGGSGGGGSGGGGSDKTHTCPPCPAPELLGGPSVFLFPPKPKDTLMISRTPEVTCVVVDVSHEDPEVKFNWYVDGVEVHNAKTKPCEEQYGSTYRCVSVLTVLHQDWLNGKEYKCKVSNKALPAPIEKTISKAKGQPREPQVYTLPPSREEMTKNQVSLTCLVKGFYPSDIAVEWESNGQPENNYKTTPPVLDSDGSFFLYSKLTVDKSRWQQGNVFSCSVMHEALHNHYTQKSLSLSPGK

SEQ ID NO: 3676 - protein, 492 aa, Artificial Sequence
  Synthetic
EVQLLESGGGVVQPGRSLRLSCAASGFTFSSYAMSWVRQAPGKCLEWVSAISGSGEFSYYAAAVKGRFTISRDNSKNTLYLQMNSLRAEDTAVYYCAKVRNYYGSGSLDYWGQGTLVTVSSGGGGSGGGGSGGGGSEIVLTQSPGTLSLSPGERATLSCRASQSVSSTYLAWYQQKPGQAPRLLIYGASIRATGIPDRFSGSGSGTDFTLTISRLEPEDFAVYYCQQYQSSLTFGCGTKVEIKSGGGGSQVQLVQSGAEVVKPGASVKVSCKASGYTFTSSWMNWVRQAPGQCLEWMGRIYTGTGETKYSGKFQGRVTITRDTSASTAYMELSSLTSEDTAVYYCARQRDYGALYAMDYWGQGTLVTVSSGGGGSGGGGSGGGGSDIQLTQSPSFLSASVGDRVTITCRASDDIYSYLAWYQQKPGKAPKLLVYNAKTLAEGVPSRFSGSGSGTEFTLTISSLQPEDFATYYCQNHDRTPFTFGCGTKVDIK

SEQ ID NO: 3677 - protein, 747 aa, Artificial Sequence
  Synthetic
EVQLLESGGGVVQPGRSLRLSCAASGFTFSSYAMSWVRQAPGKCLEWVSAISGSGEFSYYAAAVKGRFTISRDNSKNTLYLQMNSLRAEDTAVYYCAKVRNYYGSGSLDYWGQGTLVTVSSGGGGSGGGGSGGGGSEIVLTQSPGTLSLSPGERATLSCRASQSVSSTYLAWYQQKPGQAPRLLIYGASIRATGIPDRFSGSGSGTDFTLTISRLEPEDFAVYYCQQYQSSLTFGCGTKVEIKSGGGGSQVQLVQSGAEVVKPGASVKVSCKASGYTFTSSWMNWVRQAPGQCLEWMGRIYTGTGETKYSGKFQGRVTITRDTSASTAYMELSSLTSEDTAVYYCARQRDYGALYAMDYWGQGTLVTVSSGGGGSGGGGSGGGGSDIQLTQSPSFLSASVGDRVTITCRASDDIYSYLAWYQQKPGKAPKLLVYNAKTLAEGVPSRFSGSGSGTEFTLTISSLQPEDFATYYCQNHDRTPFTFGCGTKVDIKSGGGGSEVQLVESGGGLVQPGGSLKLSCAASGFTFNKYAMNWVRQAPGKGLEWVARIRSKYNNYATYYADSVKDRFTISRDDSKNTAYLQMNNLKTEDTAVYYCVRHGNFGNSYISYWAYWGQGTLVTVSSGGGGSGGGGSGGGGSQTVVTQEPSLTVSPGGTVTLTCGSSTGAVTSGNYPNWVQQKPGQAPRGLIGGTKFLAPGTPARFSGSLLGGKAALTLSGVQPEDEAEYYCVLWYSNRWVFGGGTKLTVL

SEQ ID NO: 3678 - protein, 1235 aa, Artificial Sequence
  Synthetic
EVQLLESGGGVVQPGRSLRLSCAASGFTFSSYAMSWVRQAPGKCLEWVSAISGSGEFSYYAAAVKGRFTISRDNSKNTLYLQMNSLRAEDTAVYYCAKVRNYYGSGSLDYWGQGTLVTVSSGGGGSGGGGSGGGGSEIVLTQSPGTLSLSPGERATLSCRASQSVSSTYLAWYQQKPGQAPRLLIYGASIRATGIPDRFSGSGSGTDFTLTISRLEPEDFAVYYCQQYQSSLTFGCGTKVEIKSGGGGSQVQLVQSGAEVVKPGASVKVSCKASGYTFTSSWMNWVRQAPGQCLEWMGRIYTGTGETKYSGKFQGRVTITRDTSASTAYMELSSLTSEDTAVYYCARQRDYGALYAMDYWGQGTLVTVSSGGGGSGGGGSGGGGSDIQLTQSPSFLSASVGDRVTITCRASDDIYSYLAWYQQKPGKAPKLLVYNAKTLAEGVPSRFSGSGSGTEFTLTISSLQPEDFATYYCQNHDRTPFTFGCGTKVDIKSGGGGSEVQLVESGGGLVQPGGSLKLSCAASGFTFNKYAMNWVRQAPGKGLEWVARIRSKYNNYATYYADSVKDRFTISRDDSKNTAYLQMNNLKTEDTAVYYCVRHGNFGNSYISYWAYWGQGTLVTVSSGGGGSGGGGSGGGGSQTVVTQEPSLTVSPGGTVTLTCGSSTGAVTSGNYPNWVQQKPGQAPRGLIGGTKFLAPGTPARFSGSLLGGKAALTLSGVQPEDEAEYYCVLWYSNRWVFGGGTKLTVLGGGGDKTHTCPPCPAPELLGGPSVFLFPPKPKDTLMISRTPEVTCVVVDVSHEDPEVKFNWYVDGVEVHNAKTKPCEEQYGSTYRCVSVLTVLHQDWLNGKEYKCKVSNKALPAPIEKTISKAKGQPREPQVYTLPPSREEMTKNQVSLTCLVKGFYPSDIAVEWESNGQPENNYKTTPPVLDSDGSFFLYSKLTVDKSRWQQGNVFSCSVMHEALHNHYTQKSLSLSPGKGGGGSGGGGSGGGGSGGGGSGGGGSGGGGSDKTHTCPPCPAPELLGGPSVFLFPPKPKDTLMISRTPEVTCVVVDVSHEDPEVKFNWYVDGVEVHNAKTKPCEEQYGSTYRCVSVLTVLHQDWLNGKEYKCKVSNKALPAPIEKTISKAKGQPREPQVYTLPPSREEMTKNQVSLTCLVKGFYPSDIAVEWESNGQPENNYKTTPPVLDSDGSFFLYSKLTVDKSRWQQGNVFSCSVMHEALHNHYTQKSLSLSPGK

SEQ ID NO: 3679 - protein, 5 aa, Artificial Sequence
  Synthetic
NYWLG

SEQ ID NO: 3680 - protein, 17 aa, Artificial Sequence
  Synthetic
DIFPGSGNIHYNEKFKG

SEQ ID NO: 3681 - protein, 10 aa, Artificial Sequence
  Synthetic
LRNWDEPMDY

SEQ ID NO: 3682 - protein, 17 aa, Artificial Sequence
  Synthetic
KSSQSLLNSGNQKNYLT

SEQ ID NO: 3683 - protein, 7 aa, Artificial Sequence
  Synthetic
WASTRES

SEQ ID NO: 3684 - protein, 9 aa, Artificial Sequence
  Synthetic
QNDYSYPLT

SEQ ID NO: 3685 - protein, 113 aa, Artificial Sequence
  Synthetic
ELVMTQSPSSLTVTAGEKVTMSCKSSQSLLNSGNQKNYLTWYQQKPGQPPKLLIYWASTRESGVPDRFTGSGSGTDFTLTISSVQAEDLAVYYCQNDYSYPLTFGAGTKLEIK

SEQ ID NO: 3686 - protein, 120 aa, Artificial Sequence
  Synthetic
EVQLLEQSGAELVRPGTSVKISCKASGYAFTNYWLGWVKQRPGHGLEWIGDIFPGSGNIHYNEKFKGKATLTADKSSSTAYMQLSSLTFEDSAVYFCARLRNWDEPMDYWGQGTTVTVSS

SEQ ID NO: 3687 - protein, 248 aa, Artificial Sequence
  Synthetic
ELVMTQSPSSLTVTAGEKVTMSCKSSQSLLNSGNQKNYLTWYQQKPGQPPKLLIYWASTRESGVPDRFTGSGSGTDFTLTISSVQAEDLAVYYCQNDYSYPLTFGAGTKLEIKGGGGSGGGGSGGGGSEVQLLEQSGAELVRPGTSVKISCKASGYAFTNYWLGWVKQRPGHGLEWIGDIFPGSGNIHYNEKFKGKATLTADKSSSTAYMQLSSLTFEDSAVYFCARLRNWDEPMDYWGQGTTVTVSS

SEQ ID NO: 3688 - protein, 502 aa, Artificial Sequence
  Synthetic
ELVMTQSPSSLTVTAGEKVTMSCKSSQSLLNSGNQKNYLTWYQQKPGQPPKLLIYWASTRESGVPDRFTGSGSGTDFTLTISSVQAEDLAVYYCQNDYSYPLTFGAGTKLEIKGGGGSGGGGSGGGGSEVQLLEQSGAELVRPGTSVKISCKASGYAFTNYWLGWVKQRPGHGLEWIGDIFPGSGNIHYNEKFKGKATLTADKSSSTAYMQLSSLTFEDSAVYFCARLRNWDEPMDYWGQGTTVTVSSGGGGSEVQLVESGGGLVQPGGSLKLSCAASGFTFNKYAMNWVRQAPGKGLEWVARIRSKYNNYATYYADSVKDRFTISRDDSKNTAYLQMNNLKTEDTAVYYCVRHGNFGNSYISYWAYWGQGTLVTVSSGGGGSGGGGSGGGGSQTVVTQEPSLTVSPGGTVTLTCGSSTGAVTSGNYPNWVQQKPGQAPRGLIGGTKFLAPGTPARFSGSLLGGKAALTLSGVQPEDEAEYYCVLWYSNRWVFGGGTKLTVL

SEQ ID NO: 3689 - protein, 990 aa, Artificial Sequence
  Synthetic
ELVMTQSPSSLTVTAGEKVTMSCKSSQSLLNSGNQKNYLTWYQQKPGQPPKLLIYWASTRESGVPDRFTGSGSGTDFTLTISSVQAEDLAVYYCQNDYSYPLTFGAGTKLEIKGGGGSGGGGSGGGGSEVQLLEQSGAELVRPGTSVKISCKASGYAFTNYWLGWVKQRPGHGLEWIGDIFPGSGNIHYNEKFKGKATLTADKSSSTAYMQLSSLTFEDSAVYFCARLRNWDEPMDYWGQGTTVTVSSGGGGSEVQLVESGGGLVQPGGSLKLSCAASGFTFNKYAMNWVRQAPGKGLEWVARIRSKYNNYATYYADSVKDRFTISRDDSKNTAYLQMNNLKTEDTAVYYCVRHGNFGNSYISYWAYWGQGTLVTVSSGGGGSGGGGSGGGGSQTVVTQEPSLTVSPGGTVTLTCGSSTGAVTSGNYPNWVQQKPGQAPRGLIGGTKFLAPGTPARFSGSLLGGKAALTLSGVQPEDEAEYYCVLWYSNRWVFGGGTKLTVLGGGGDKTHTCPPCPAPELLGGPSVFLFPPKPKDTLMISRTPEVTCVVVDVSHEDPEVKFNWYVDGVEVHNAKTKPCEEQYGSTYRCVSVLTVLHQDWLNGKEYKCKVSNKALPAPIEKTISKAKGQPREPQVYTLPPSREEMTKNQVSLTCLVKGFYPSDIAVEWESNGQPENNYKTTPPVLDSDGSFFLYSKLTVDKSRWQQGNVFSCSVMHEALHNHYTQKSLSLSPGKGGGGSGGGGSGGGGSGGGGSGGGGSGGGGSDKTHTCPPCPAPELLGGPSVFLFPPKPKDTLMISRTPEVTCVVVDVSHEDPEVKFNWYVDGVEVHNAKTKPCEEQYGSTYRCVSVLTVLHQDWLNGKEYKCKVSNKALPAPIEKTISKAKGQPREPQVYTLPPSREEMTKNQVSLTCLVKGFYPSDIAVEWESNGQPENNYKTTPPVLDSDGSFFLYSKLTVDKSRWQQGNVFSCSVMHEALHNHYTQKSLSLSPGK

SEQ ID NO: 3690 - protein, 5 aa, Artificial Sequence
  Synthetic
SYGMG

SEQ ID NO: 3691 - protein, 17 aa, Artificial Sequence
  Synthetic
VISYDGSNKYYADSVKG

SEQ ID NO: 3692 - protein, 21 aa, Artificial Sequence
  Synthetic
EGAHFGSGSYYPLYYYYAMDV

SEQ ID NO: 3693 - protein, 12 aa, Artificial Sequence
  Synthetic
RASQSVSSSYLA

SEQ ID NO: 3694 - protein, 7 aa, Artificial Sequence
  Synthetic
GASIRAT

SEQ ID NO: 3695 - protein, 10 aa, Artificial Sequence
  Synthetic
QQYGSSPIFT

SEQ ID NO: 3696 - protein, 130 aa, Artificial Sequence
  Synthetic
EVQLLESGGGVVQPGRSLRLSCAASGFTFSSYGMGWVRQAPGKGLEWVAVISYDGSNKYYADSVKGRFTISRDNSKNTLYLQMNSLRAEDTAVYYCAREGAHFGSGSYYPLYYYYAMDVWGQGTTVTVSS

SEQ ID NO: 3697 - protein, 109 aa, Artificial Sequence
  Synthetic
ELTLTQSPGTLSLSPGERATLSCRASQSVSSSYLAWYQQKPGQAPRLLIYGASIRATGIPDRFSGSGSGTDFTLTISRLEPEDFAVYYCQQYGSSPIFTFGPGTKVEIK

SEQ ID NO: 3698 - protein, 254 aa, Artificial Sequence
  Synthetic
EVQLLESGGGVVQPGRSLRLSCAASGFTFSSYGMGWVRQAPGKGLEWVAVISYDGSNKYYADSVKGRFTISRDNSKNTLYLQMNSLRAEDTAVYYCAREGAHFGSGSYYPLYYYYAMDVWGQGTTVTVSSGGGGSGGGGSGGGGSELTLTQSPGTLSLSPGERATLSCRASQSVSSSYLAWYQQKPGQAPRLLIYGASIRATGIPDRFSGSGSGTDFTLTISRLEPEDFAVYYCQQYGSSPIFTFGPGTKVEIK

SEQ ID NO: 3699 - protein, 509 aa, Artificial Sequence
  Synthetic
EVQLLESGGGVVQPGRSLRLSCAASGFTFSSYGMGWVRQAPGKGLEWVAVISYDGSNKYYADSVKGRFTISRDNSKNTLYLQMNSLRAEDTAVYYCAREGAHFGSGSYYPLYYYYAMDVWGQGTTVTVSSGGGGSGGGGSGGGGSELTLTQSPGTLSLSPGERATLSCRASQSVSSSYLAWYQQKPGQAPRLLIYGASIRATGIPDRFSGSGSGTDFTLTISRLEPEDFAVYYCQQYGSSPIFTFGPGTKVEIKSGGGGSEVQLVESGGGLVQPGGSLKLSCAASGFTFNKYAMNWVRQAPGKGLEWVARIRSKYNNYATYYADSVKDRFTISRDDSKNTAYLQMNNLKTEDTAVYYCVRHGNFGNSYISYWAYWGQGTLVTVSSGGGGSGGGGSGGGGSQTVVTQEPSLTVSPGGTVTLTCGSSTGAVTSGNYPNWVQQKPGQAPRGLIGGTKFLAPGTPARFSGSLLGGKAALTLSGVQPEDEAEYYCVLWYSNRWVFGGGTKLTVL

SEQ ID NO: 3700 - protein, 997 aa, Artificial Sequence
  Synthetic
EVQLLESGGGVVQPGRSLRLSCAASGFTFSSYGMGWVRQAPGKGLEWVAVISYDGSNKYYADSVKGRFTISRDNSKNTLYLQMNSLRAEDTAVYYCAREGAHFGSGSYYPLYYYYAMDVWGQGTTVTVSSGGGGSGGGGSGGGGSELTLTQSPGTLSLSPGERATLSCRASQSVSSSYLAWYQQKPGQAPRLLIYGASIRATGIPDRFSGSGSGTDFTLTISRLEPEDFAVYYCQQYGSSPIFTFGPGTKVEIKSGGGGSEVQLVESGGGLVQPGGSLKLSCAASGFTFNKYAMNWVRQAPGKGLEWVARIRSKYNNYATYYADSVKDRFTISRDDSKNTAYLQMNNLKTEDTAVYYCVRHGNFGNSYISYWAYWGQGTLVTVSSGGGGSGGGGSGGGGSQTVVTQEPSLTVSPGGTVTLTCGSSTGAVTSGNYPNWVQQKPGQAPRGLIGGTKFLAPGTPARFSGSLLGGKAALTLSGVQPEDEAEYYCVLWYSNRWVFGGGTKLTVLGGGGDKTHTCPPCPAPELLGGPSVFLFPPKPKDTLMISRTPEVTCVVVDVSHEDPEVKFNWYVDGVEVHNAKTKPCEEQYGSTYRCVSVLTVLHQDWLNGKEYKCKVSNKALPAPIEKTISKAKGQPREPQVYTLPPSREEMTKNQVSLTCLVKGFYPSDIAVEWESNGQPENNYKTTPPVLDSDGSFFLYSKLTVDKSRWQQGNVFSCSVMHEALHNHYTQKSLSLSPGKGGGGSGGGGSGGGGSGGGGSGGGGSGGGGSDKTHTCPPCPAPELLGGPSVFLFPPKPKDTLMISRTPEVTCVVVDVSHEDPEVKFNWYVDGVEVHNAKTKPCEEQYGSTYRCVSVLTVLHQDWLNGKEYKCKVSNKALPAPIEKTISKAKGQPREPQVYTLPPSREEMTKNQVSLTCLVKGFYPSDIAVEWESNGQPENNYKTTPPVLDSDGSFFLYSKLTVDKSRWQQGNVFSCSVMHEALHNHYTQKSLSLSPGK

SEQ ID NO: 3701 - protein, 248 aa, Artificial Sequence; identical to SEQ ID NO: 3687
  Synthetic

SEQ ID NO: 3702 - protein, 761 aa, Artificial Sequence
  Synthetic
ELVMTQSPSSLTVTAGEKVTMSCKSSQSLLNSGNQKNYLTWYQQKPGQPPKLLIYWASTRESGVPDRFTGSGSGTDFTLTISSVQAEDLAVYYCQNDYSYPLTFGAGTKLEIKGGGGSGGGGSGGGGSEVQLLEQSGAELVRPGTSVKISCKASGYAFTNYWLGWVKQRPGHGLEWIGDIFPGSGNIHYNEKFKGKATLTADKSSSTAYMQLSSLTFEDSAVYFCARLRNWDEPMDYWGQGTTVTVSSGGGGSEVQLLESGGGVVQPGRSLRLSCAASGFTFSSYGMGWVRQAPGKGLEWVAVISYDGSNKYYADSVKGRFTISRDNSKNTLYLQMNSLRAEDTAVYYCAREGAHFGSGSYYPLYYYYAMDVWGQGTTVTVSSGGGGSGGGGSGGGGSELTLTQSPGTLSLSPGERATLSCRASQSVSSSYLAWYQQKPGQAPRLLIYGASIRATGIPDRFSGSGSGTDFTLTISRLEPEDFAVYYCQQYGSSPIFTFGPGTKVEIKGGGGSEVQLVESGGGLVQPGGSLKLSCAASGFTFNKYAMNWVRQAPGKGLEWVARIRSKYNNYATYYADSVKDRFTISRDDSKNTAYLQMNNLKTEDTAVYYCVRHGNFGNSYISYWAYWGQGTLVTVSSGGGGSGGGGSGGGGSQTVVTQEPSLTVSPGGTVTLTCGSSTGAVTSGNYPNWVQQKPGQAPRGLIGGTKFLAPGTPARFSGSLLGGKAALTLSGVQPEDEAEYYCVLWYSNRWVFGGGTKLTVL

SEQ ID NO: 3703 - protein, 762 aa, Artificial Sequence
  Synthetic
ELVMTQSPSSLTVTAGEKVTMSCKSSQSLLNSGNQKNYLTWYQQKPGQPPKLLIYWASTRESGVPDRFTGSGSGTDFTLTISSVQAEDLAVYYCQNDYSYPLTFGAGTKLEIKGGGGSGGGGSGGGGSEVQLLEQSGAELVRPGTSVKISCKASGYAFTNYWLGWVKQRPGHGLEWIGDIFPGSGNIHYNEKFKGKATLTADKSSSTAYMQLSSLTFEDSAVYFCARLRNWDEPMDYWGQGTTVTVSSGGGGSEVQLLESGGGVVQPGRSLRLSCAASGFTFSSYGMGWVRQAPGKGLEWVAVISYDGSNKYYADSVKGRFTISRDNSKNTLYLQMNSLRAEDTAVYYCAREGAHFGSGSYYPLYYYYAMDVWGQGTTVTVSSGGGGSGGGGSGGGGSELTLTQSPGTLSLSPGERATLSCRASQSVSSSYLAWYQQKPGQAPRLLIYGASIRATGIPDRFSGSGSGTDFTLTISRLEPEDFAVYYCQQYGSSPIFTFGPGTKVEIKSGGGGSEVQLVESGGGLVQPGGSLKLSCAASGFTFNKYAMNWVRQAPGKGLEWVARIRSKYNNYATYYADSVKDRFTISRDDSKNTAYLQMNNLKTEDTAVYYCVRHGNFGNSYISYWAYWGQGTLVTVSSGGGGSGGGGSGGGGSQTVVTQEPSLTVSPGGTVTLTCGSSTGAVTSGNYPNWVQQKPGQAPRGLIGGTKFLAPGTPARFSGSLLGGKAALTLSGVQPEDEAEYYCVLWYSNRWVFGGGTKLTVL

SEQ ID NO: 3704 - protein, 1249 aa, Artificial Sequence
  Synthetic
ELVMTQSPSSLTVTAGEKVTMSCKSSQSLLNSGNQKNYLTWYQQKPGQPPKLLIYWASTRESGVPDRFTGSGSGTDFTLTISSVQAEDLAVYYCQNDYSYPLTFGAGTKLEIKGGGGSGGGGSGGGGSEVQLLEQSGAELVRPGTSVKISCKASGYAFTNYWLGWVKQRPGHGLEWIGDIFPGSGNIHYNEKFKGKATLTADKSSSTAYMQLSSLTFEDSAVYFCARLRNWDEPMDYWGQGTTVTVSSGGGGSEVQLLESGGGVVQPGRSLRLSCAASGFTFSSYGMGWVRQAPGKGLEWVAVISYDGSNKYYADSVKGRFTISRDNSKNTLYLQMNSLRAEDTAVYYCAREGAHFGSGSYYPLYYYYAMDVWGQGTTVTVSSGGGGSGGGGSGGGGSELTLTQSPGTLSLSPGERATLSCRASQSVSSSYLAWYQQKPGQAPRLLIYGASIRATGIPDRFSGSGSGTDFTLTISRLEPEDFAVYYCQQYGSSPIFTFGPGTKVEIKGGGGSEVQLVESGGGLVQPGGSLKLSCAASGFTFNKYAMNWVRQAPGKGLEWVARIRSKYNNYATYYADSVKDRFTISRDDSKNTAYLQMNNLKTEDTAVYYCVRHGNFGNSYISYWAYWGQGTLVTVSSGGGGSGGGGSGGGGSQTVVTQEPSLTVSPGGTVTLTCGSSTGAVTSGNYPNWVQQKPGQAPRGLIGGTKFLAPGTPARFSGSLLGGKAALTLSGVQPEDEAEYYCVLWYSNRWVFGGGTKLTVLGGGGDKTHTCPPCPAPELLGGPSVFLFPPKPKDTLMISRTPEVTCVVVDVSHEDPEVKFNWYVDGVEVHNAKTKPCEEQYGSTYRCVSVLTVLHQDWLNGKEYKCKVSNKALPAPIEKTISKAKGQPREPQVYTLPPSREEMTKNQVSLTCLVKGFYPSDIAVEWESNGQPENNYKTTPPVLDSDGSFFLYSKLTVDKSRWQQGNVFSCSVMHEALHNHYTQKSLSLSPGKGGGGSGGGGSGGGGSGGGGSGGGGSGGGGSDKTHTCPPCPAPELLGGPSVFLFPPKPKDTLMISRTPEVTCVVVDVSHEDPEVKFNWYVDGVEVHNAKTKPCEEQYGSTYRCVSVLTVLHQDWLNGKEYKCKVSNKALPAPIEKTISKAKGQPREPQVYTLPPSREEMTKNQVSLTCLVKGFYPSDIAVEWESNGQPENNYKTTPPVLDSDGSFFLYSKLTVDKSRWQQGNVFSCSVMHEALHNHYTQKSLSLSPGK

SEQ ID NO: 3705 - protein, 1250 aa, Artificial Sequence
  Synthetic
ELVMTQSPSSLTVTAGEKVTMSCKSSQSLLNSGNQKNYLTWYQQKPGQPPKLLIYWASTRESGVPDRFTGSGSGTDFTLTISSVQAEDLAVYYCQNDYSYPLTFGAGTKLEIKGGGGSGGGGSGGGGSEVQLLEQSGAELVRPGTSVKISCKASGYAFTNYWLGWVKQRPGHGLEWIGDIFPGSGNIHYNEKFKGKATLTADKSSSTAYMQLSSLTFEDSAVYFCARLRNWDEPMDYWGQGTTVTVSSGGGGSEVQLLESGGGVVQPGRSLRLSCAASGFTFSSYGMGWVRQAPGKGLEWVAVISYDGSNKYYADSVKGRFTISRDNSKNTLYLQMNSLRAEDTAVYYCAREGAHFGSGSYYPLYYYYAMDVWGQGTTVTVSSGGGGSGGGGSGGGGSELTLTQSPGTLSLSPGERATLSCRASQSVSSSYLAWYQQKPGQAPRLLIYGASIRATGIPDRFSGSGSGTDFTLTISRLEPEDFAVYYCQQYGSSPIFTFGPGTKVEIKSGGGGSEVQLVESGGGLVQPGGSLKLSCAASGFTFNKYAMNWVRQAPGKGLEWVARIRSKYNNYATYYADSVKDRFTISRDDSKNTAYLQMNNLKTEDTAVYYCVRHGNFGNSYISYWAYWGQGTLVTVSSGGGGSGGGGSGGGGSQTVVTQEPSLTVSPGGTVTLTCGSSTGAVTSGNYPNWVQQKPGQAPRGLIGGTKFLAPGTPARFSGSLLGGKAALTLSGVQPEDEAEYYCVLWYSNRWVFGGGTKLTVLGGGGDKTHTCPPCPAPELLGGPSVFLFPPKPKDTLMISRTPEVTCVVVDVSHEDPEVKFNWYVDGVEVHNAKTKPCEEQYGSTYRCVSVLTVLHQDWLNGKEYKCKVSNKALPAPIEKTISKAKGQPREPQVYTLPPSREEMTKNQVSLTCLVKGFYPSDIAVEWESNGQPENNYKTTPPVLDSDGSFFLYSKLTVDKSRWQQGNVFSCSVMHEALHNHYTQKSLSLSPGKGGGGSGGGGSGGGGSGGGGSGGGGSGGGGSDKTHTCPPCPAPELLGGPSVFLFPPKPKDTLMISRTPEVTCVVVDVSHEDPEVKFNWYVDGVEVHNAKTKPCEEQYGSTYRCVSVLTVLHQDWLNGKEYKCKVSNKALPAPIEKTISKAKGQPREPQVYTLPPSREEMTKNQVSLTCLVKGFYPSDIAVEWESNGQPENNYKTTPPVLDSDGSFFLYSKLTVDKSRWQQGNVFSCSVMHEALHNHYTQKSLSLSPGK

SEQ ID NO: 3706 - protein, 508 aa, Artificial Sequence
  Synthetic
EVQLLESGGGVVQPGRSLRLSCAASGFTFSSYGMGWVRQAPGKGLEWVAVISYDGSNKYYADSVKGRFTISRDNSKNTLYLQMNSLRAEDTAVYYCAREGAHFGSGSYYPLYYYYAMDVWGQGTTVTVSSGGGGSGGGGSGGGGSELTLTQSPGTLSLSPGERATLSCRASQSVSSSYLAWYQQKPGQAPRLLIYGASIRATGIPDRFSGSGSGTDFTLTISRLEPEDFAVYYCQQYGSSPIFTFGPGTKVEIKSGGGGSELVMTQSPSSLTVTAGEKVTMSCKSSQSLLNSGNQKNYLTWYQQKPGQPPKLLIYWASTRESGVPDRFTGSGSGTDFTLTISSVQAEDLAVYYCQNDYSYPLTFGAGTKLEIKGGGGSGGGGSGGGGSEVQLLEQSGAELVRPGTSVKISCKASGYAFTNYWLGWVKQRPGHGLEWIGDIFPGSGNIHYNEKFKGKATLTADKSSSTAYMQLSSLTFEDSAVYFCARLRNWDEPMDYWGQGTTVTVSS

SEQ ID NO: 3707 - protein, 762 aa, Artificial Sequence
  Synthetic
EVQLLESGGGVVQPGRSLRLSCAASGFTFSSYGMGWVRQAPGKGLEWVAVISYDGSNKYYADSVKGRFTISRDNSKNTLYLQMNSLRAEDTAVYYCAREGAHFGSGSYYPLYYYYAMDVWGQGTTVTVSSGGGGSGGGGSGGGGSELTLTQSPGTLSLSPGERATLSCRASQSVSSSYLAWYQQKPGQAPRLLIYGASIRATGIPDRFSGSGSGTDFTLTISRLEPEDFAVYYCQQYGSSPIFTFGPGTKVEIKSGGGGSELVMTQSPSSLTVTAGEKVTMSCKSSQSLLNSGNQKNYLTWYQQKPGQPPKLLIYWASTRESGVPDRFTGSGSGTDFTLTISSVQAEDLAVYYCQNDYSYPLTFGAGTKLEIKGGGGSGGGGSGGGGSEVQLLEQSGAELVRPGTSVKISCKASGYAFTNYWLGWVKQRPGHGLEWIGDIFPGSGNIHYNEKFKGKATLTADKSSSTAYMQLSSLTFEDSAVYFCARLRNWDEPMDYWGQGTTVTVSSGGGGSEVQLVESGGGLVQPGGSLKLSCAASGFTFNKYAMNWVRQAPGKGLEWVARIRSKYNNYATYYADSVKDRFTISRDDSKNTAYLQMNNLKTEDTAVYYCVRHGNFGNSYISYWAYWGQGTLVTVSSGGGGSGGGGSGGGGSQTVVTQEPSLTVSPGGTVTLTCGSSTGAVTSGNYPNWVQQKPGQAPRGLIGGTKFLAPGTPARFSGSLLGGKAALTLSGVQPEDEAEYYCVLWYSNRWVFGGGTKLTVL

SEQ ID NO: 3708 - protein, 1250 aa, Artificial Sequence
  Synthetic
EVQLLESGGGVVQPGRSLRLSCAASGFTFSSYGMGWVRQAPGKGLEWVAVISYDGSNKYYADSVKGRFTISRDNSKNTLYLQMNSLRAEDTAVYYCAREGAHFGSGSYYPLYYYYAMDVWGQGTTVTVSSGGGGSGGGGSGGGGSELTLTQSPGTLSLSPGERATLSCRASQSVSSSYLAWYQQKPGQAPRLLIYGASIRATGIPDRFSGSGSGTDFTLTISRLEPEDFAVYYCQQYGSSPIFTFGPGTKVEIKSGGGGSELVMTQSPSSLTVTAGEKVTMSCKSSQSLLNSGNQKNYLTWYQQKPGQPPKLLIYWASTRESGVPDRFTGSGSGTDFTLTISSVQAEDLAVYYCQNDYSYPLTFGAGTKLEIKGGGGSGGGGSGGGGSEVQLLEQSGAELVRPGTSVKISCKASGYAFTNYWLGWVKQRPGHGLEWIGDIFPGSGNIHYNEKFKGKATLTADKSSSTAYMQLSSLTFEDSAVYFCARLRNWDEPMDYWGQGTTVTVSSGGGGSEVQLVESGGGLVQPGGSLKLSCAASGFTFNKYAMNWVRQAPGKGLEWVARIRSKYNNYATYYADSVKDRFTISRDDSKNTAYLQMNNLKTEDTAVYYCVRHGNFGNSYISYWAYWGQGTLVTVSSGGGGSGGGGSGGGGSQTVVTQEPSLTVSPGGTVTLTCGSSTGAVTSGNYPNWVQQKPGQAPRGLIGGTKFLAPGTPARFSGSLLGGKAALTLSGVQPEDEAEYYCVLWYSNRWVFGGGTKLTVLGGGGDKTHTCPPCPAPELLGGPSVFLFPPKPKDTLMISRTPEVTCVVVDVSHEDPEVKFNWYVDGVEVHNAKTKPCEEQYGSTYRCVSVLTVLHQDWLNGKEYKCKVSNKALPAPIEKTISKAKGQPREPQVYTLPPSREEMTKNQVSLTCLVKGFYPSDIAVEWESNGQPENNYKTTPPVLDSDGSFFLYSKLTVDKSRWQQGNVFSCSVMHEALHNHYTQKSLSLSPGKGGGGSGGGGSGGGGSGGGGSGGGGSGGGGSDKTHTCPPCPAPELLGGPSVFLFPPKPKDTLMISRTPEVTCVVVDVSHEDPEVKFNWYVDGVEVHNAKTKPCEEQYGSTYRCVSVLTVLHQDWLNGKEYKCKVSNKALPAPIEKTISKAKGQPREPQVYTLPPSREEMTKNQVSLTCLVKGFYPSDIAVEWESNGQPENNYKTTPPVLDSDGSFFLYSKLTVDKSRWQQGNVFSCSVMHEALHNHYTQKSLSLSPGK

SEQ ID NO: 3709 - protein, 1235 aa, Artificial Sequence
  Synthetic
QVQLVESGGGLVKPGGSLRLSCAASGFTFSDYYMTWIRQAPGKCLEWISYISSSGSTIYYADSVKGRFTISRDNAKNSLYLQMNSLRAEDTAVYYCARDRNSHFDYWGQGTLVTVSSGGGGSGGGGSGGGGSDIQMTQSPSSVSASVGDRVTITCRASQGITRWLAWYQQKPGKAPKLLIYAASVLQSGVPSRFSGSGSGTDFTLTISSLQPEDFATYYCQQSNSFPRTFGCGTKVEIKSGGGGSELVMTQSPSSLTVTAGEKVTMSCKSSQSLLNSGNQKNYLTWYQQKPGQPPKLLIYWASTRESGVPDRFTGSGSGTDFTLTISSVQAEDLAVYYCQNDYSYPLTFGAGTKLEIKGGGGSGGGGSGGGGSEVQLLEQSGAELVRPGTSVKISCKASGYAFTNYWLGWVKQRPGHGLEWIGDIFPGSGNIHYNEKFKGKATLTADKSSSTAYMQLSSLTFEDSAVYFCARLRNWDEPMDYWGQGTTVTVSSGGGGSEVQLVESGGGLVQPGGSLKLSCAASGFTFNKYAMNWVRQAPGKGLEWVARIRSKYNNYATYYADSVKDRFTISRDDSKNTAYLQMNNLKTEDTAVYYCVRHGNFGNSYISYWAYWGQGTLVTVSSGGGGSGGGGSGGGGSQTVVTQEPSLTVSPGGTVTLTCGSSTGAVTSGNYPNWVQQKPGQAPRGLIGGTKFLAPGTPARFSGSLLGGKAALTLSGVQPEDEAEYYCVLWYSNRWVFGGGTKLTVLGGGGDKTHTCPPCPAPELLGGPSVFLFPPKPKDTLMISRTPEVTCVVVDVSHEDPEVKFNWYVDGVEVHNAKTKPCEEQYGSTYRCVSVLTVLHQDWLNGKEYKCKVSNKALPAPIEKTISKAKGQPREPQVYTLPPSREEMTKNQVSLTCLVKGFYPSDIAVEWESNGQPENNYKTTPPVLDSDGSFFLYSKLTVDKSRWQQGNVFSCSVMHEALHNHYTQKSLSLSPGKGGGGSGGGGSGGGGSGGGGSGGGGSGGGGSDKTHTCPPCPAPELLGGPSVFLFPPKPKDTLMISRTPEVTCVVVDVSHEDPEVKFNWYVDGVEVHNAKTKPCEEQYGSTYRCVSVLTVLHQDWLNGKEYKCKVSNKALPAPIEKTISKAKGQPREPQVYTLPPSREEMTKNQVSLTCLVKGFYPSDIAVEWESNGQPENNYKTTPPVLDSDGSFFLYSKLTVDKSRWQQGNVFSCSVMHEALHNHYTQKSLSLSPGK

SEQ ID NO: 3710 - protein, 1240 aa, Artificial Sequence
  Synthetic
QVQLVESGGGLVKPGGSLRLSCAASGFTFSDYYMTWIRQAPGKCLEWISYISSSGSTIYYADSVKGRFTISRDNAKNSLYLQMNSLRAEDTAVYYCARDRNSHFDYWGQGTLVTVSSGGGGSGGGGSGGGGSDIQMTQSPSSVSASVGDRVTITCRASQGITRWLAWYQQKPGKAPKLLIYAASVLQSGVPSRFSGSGSGTDFTLTISSLQPEDFATYYCQQSNSFPRTFGCGTKVEIKSGGGGSGGGGSELVMTQSPSSLTVTAGEKVTMSCKSSQSLLNSGNQKNYLTWYQQKPGQPPKLLIYWASTRESGVPDRFTGSGSGTDFTLTISSVQAEDLAVYYCQNDYSYPLTFGAGTKLEIKGGGGSGGGGSGGGGSEVQLLEQSGAELVRPGTSVKISCKASGYAFTNYWLGWVKQRPGHGLEWIGDIFPGSGNIHYNEKFKGKATLTADKSSSTAYMQLSSLTFEDSAVYFCARLRNWDEPMDYWGQGTTVTVSSGGGGSEVQLVESGGGLVQPGGSLKLSCAASGFTFNKYAMNWVRQAPGKGLEWVARIRSKYNNYATYYADSVKDRFTISRDDSKNTAYLQMNNLKTEDTAVYYCVRHGNFGNSYISYWAYWGQGTLVTVSSGGGGSGGGGSGGGGSQTVVTQEPSLTVSPGGTVTLTCGSSTGAVTSGNYPNWVQQKPGQAPRGLIGGTKFLAPGTPARFSGSLLGGKAALTLSGVQPEDEAEYYCVLWYSNRWVFGGGTKLTVLGGGGDKTHTCPPCPAPELLGGPSVFLFPPKPKDTLMISRTPEVTCVVVDVSHEDPEVKFNWYVDGVEVHNAKTKPCEEQYGSTYRCVSVLTVLHQDWLNGKEYKCKVSNKALPAPIEKTISKAKGQPREPQVYTLPPSREEMTKNQVSLTCLVKGFYPSDIAVEWESNGQPENNYKTTPPVLDSDGSFFLYSKLTVDKSRWQQGNVFSCSVMHEALHNHYTQKSLSLSPGKGGGGSGGGGSGGGGSGGGGSGGGGSGGGGSDKTHTCPPCPAPELLGGPSVFLFPPKPKDTLMISRTPEVTCVVVDVSHEDPEVKFNWYVDGVEVHNAKTKPCEEQYGSTYRCVSVLTVLHQDWLNGKEYKCKVSNKALPAPIEKTISKAKGQPREPQVYTLPPSREEMTKNQVSLTCLVKGFYPSDIAVEWESNGQPENNYKTTPPVLDSDGSFFLYSKLTVDKSRWQQGNVFSCSVMHEALHNHYTQKSLSLSPGK

SEQ ID NO: 3711 - protein, 1245 aa, Artificial Sequence
  Synthetic
QVQLVESGGGLVKPGGSLRLSCAASGFTFSDYYMTWIRQAPGKCLEWISYISSSGSTIYYADSVKGRFTISRDNAKNSLYLQMNSLRAEDTAVYYCARDRNSHFDYWGQGTLVTVSSGGGGSGGGGSGGGGSDIQMTQSPSSVSASVGDRVTITCRASQGITRWLAWYQQKPGKAPKLLIYAASVLQSGVPSRFSGSGSGTDFTLTISSLQPEDFATYYCQQSNSFPRTFGCGTKVEIKSGGGGSGGGGSGGGGSELVMTQSPSSLTVTAGEKVTMSCKSSQSLLNSGNQKNYLTWYQQKPGQPPKLLIYWASTRESGVPDRFTGSGSGTDFTLTISSVQAEDLAVYYCQNDYSYPLTFGAGTKLEIKGGGGSGGGGSGGGGSEVQLLEQSGAELVRPGTSVKISCKASGYAFTNYWLGWVKQRPGHGLEWIGDIFPGSGNIHYNEKFKGKATLTADKSSSTAYMQLSSLTFEDSAVYFCARLRNWDEPMDYWGQGTTVTVSSGGGGSEVQLVESGGGLVQPGGSLKLSCAASGFTFNKYAMNWVRQAPGKGLEWVARIRSKYNNYATYYADSVKDRFTISRDDSKNTAYLQMNNLKTEDTAVYYCVRHGNFGNSYISYWAYWGQGTLVTVSSGGGGSGGGGSGGGGSQTVVTQEPSLTVSPGGTVTLTCGSSTGAVTSGNYPNWVQQKPGQAPRGLIGGTKFLAPGTPARFSGSLLGGKAALTLSGVQPEDEAEYYCVLWYSNRWVFGGGTKLTVLGGGGDKTHTCPPCPAPELLGGPSVFLFPPKPKDTLMISRTPEVTCVVVDVSHEDPEVKFNWYVDGVEVHNAKTKPCEEQYGSTYRCVSVLTVLHQDWLNGKEYKCKVSNKALPAPIEKTISKAKGQPREPQVYTLPPSREEMTKNQVSLTCLVKGFYPSDIAVEWESNGQPENNYKTTPPVLDSDGSFFLYSKLTVDKSRWQQGNVFSCSVMHEALHNHYTQKSLSLSPGKGGGGSGGGGSGGGGSGGGGSGGGGSGGGGSDKTHTCPPCPAPELLGGPSVFLFPPKPKDTLMISRTPEVTCVVVDVSHEDPEVKFNWYVDGVEVHNAKTKPCEEQYGSTYRCVSVLTVLHQDWLNGKEYKCKVSNKALPAPIEKTISKAKGQPREPQVYTLPPSREEMTKNQVSLTCLVKGFYPSDIAVEWESNGQPENNYKTTPPVLDSDGSFFLYSKLTVDKSRWQQGNVFSCSVMHEALHNHYTQKSLSLSPGK

SEQ ID NO: 3712 - protein, 7 aa, Artificial Sequence
  Synthetic
NARMGVS

SEQ ID NO: 3713 - protein, 16 aa, Artificial Sequence
  Synthetic
HIFSNDEKSYSTSLKS

SEQ ID NO: 3714 - protein, 13 aa, Artificial Sequence
  Synthetic
VPEYSSGWYRFDY

SEQ ID NO: 3715 - protein, 11 aa, Artificial Sequence
  Synthetic
RASQSIRSYLN

SEQ ID NO: 3716 - protein, 7 aa, Artificial Sequence
  Synthetic
ATSSLQG

SEQ ID NO: 3717 - protein, 9 aa, Artificial Sequence
  Synthetic
QQSYSTPFT

SEQ ID NO: 3718 - protein, 123 aa, Artificial Sequence
  Synthetic
QVTLKESGPTLVKPTETLTLTCTVSGFSFRNARMGVSWIRQPPGKCLEWLAHIFSNDEKSYSTSLKSRLTISKDTSKSQVVLTMTNMDPVDTATYFCARVPEYSSGWYRFDYWGQGTLVTVSS

SEQ ID NO: 3719 - protein, 107 aa, Artificial Sequence
  Synthetic
DIQMTQSPSSLSASVGDRVTISCRASQSIRSYLNWYQQKPGKAPKLLIYATSSLQGGVPSRFSGSGSGTDFTLTISSLQPEDFATYYCQQSYSTPFTFGCGTKVEIK

SEQ ID NO: 3720 - protein, 245 aa, Artificial Sequence
  Synthetic
QVTLKESGPTLVKPTETLTLTCTVSGFSFRNARMGVSWIRQPPGKCLEWLAHIFSNDEKSYSTSLKSRLTISKDTSKSQVVLTMTNMDPVDTATYFCARVPEYSSGWYRFDYWGQGTLVTVSSGGGGSGGGGSGGGGSDIQMTQSPSSLSASVGDRVTISCRASQSIRSYLNWYQQKPGKAPKLLIYATSSLQGGVPSRFSGSGSGTDFTLTISSLQPEDFATYYCQQSYSTPFTFGCGTKVEIK

SEQ ID NO: 3721 - protein, 500 aa, Artificial Sequence
  Synthetic
QVTLKESGPTLVKPTETLTLTCTVSGFSFRNARMGVSWIRQPPGKCLEWLAHIFSNDEKSYSTSLKSRLTISKDTSKSQVVLTMTNMDPVDTATYFCARVPEYSSGWYRFDYWGQGTLVTVSSGGGGSGGGGSGGGGSDIQMTQSPSSLSASVGDRVTISCRASQSIRSYLNWYQQKPGKAPKLLIYATSSLQGGVPSRFSGSGSGTDFTLTISSLQPEDFATYYCQQSYSTPFTFGCGTKVEIKSGGGGSEVQLVESGGGLVQPGGSLKLSCAASGFTFNKYAMNWVRQAPGKGLEWVARIRSKYNNYATYYADSVKDRFTISRDDSKNTAYLQMNNLKTEDTAVYYCVRHGNFGNSYISYWAYWGQGTLVTVSSGGGGSGGGGSGGGGSQTVVTQEPSLTVSPGGTVTLTCGSSTGAVTSGNYPNWVQQKPGQAPRGLIGGTKFLAPGTPARFSGSLLGGKAALTLSGVQPEDEAEYYCVLWYSNRWVFGGGTKLTVL

SEQ ID NO: 3722 - protein, 988 aa, Artificial Sequence
  Synthetic
QVTLKESGPTLVKPTETLTLTCTVSGFSFRNARMGVSWIRQPPGKCLEWLAHIFSNDEKSYSTSLKSRLTISKDTSKSQVVLTMTNMDPVDTATYFCARVPEYSSGWYRFDYWGQGTLVTVSSGGGGSGGGGSGGGGSDIQMTQSPSSLSASVGDRVTISCRASQSIRSYLNWYQQKPGKAPKLLIYATSSLQGGVPSRFSGSGSGTDFTLTISSLQPEDFATYYCQQSYSTPFTFGCGTKVEIKSGGGGSEVQLVESGGGLVQPGGSLKLSCAASGFTFNKYAMNWVRQAPGKGLEWVARIRSKYNNYATYYADSVKDRFTISRDDSKNTAYLQMNNLKTEDTAVYYCVRHGNFGNSYISYWAYWGQGTLVTVSSGGGGSGGGGSGGGGSQTVVTQEPSLTVSPGGTVTLTCGSSTGAVTSGNYPNWVQQKPGQAPRGLIGGTKFLAPGTPARFSGSLLGGKAALTLSGVQPEDEAEYYCVLWYSNRWVFGGGTKLTVLGGGGDKTHTCPPCPAPELLGGPSVFLFPPKPKDTLMISRTPEVTCVVVDVSHEDPEVKFNWYVDGVEVHNAKTKPCEEQYGSTYRCVSVLTVLHQDWLNGKEYKCKVSNKALPAPIEKTISKAKGQPREPQVYTLPPSREEMTKNQVSLTCLVKGFYPSDIAVEWESNGQPENNYKTTPPVLDSDGSFFLYSKLTVDKSRWQQGNVFSCSVMHEALHNHYTQKSLSLSPGKGGGGSGGGGSGGGGSGGGGSGGGGSGGGGSDKTHTCPPCPAPELLGGPSVFLFPPKPKDTLMISRTPEVTCVVVDVSHEDPEVKFNWYVDGVEVHNAKTKPCEEQYGSTYRCVSVLTVLHQDWLNGKEYKCKVSNKALPAPIEKTISKAKGQPREPQVYTLPPSREEMTKNQVSLTCLVKGFYPSDIAVEWESNGQPENNYKTTPPVLDSDGSFFLYSKLTVDKSRWQQGNVFSCSVMHEALHNHYTQKSLSLSPGK

SEQ ID NO: 3723 - protein, 5 aa, Artificial Sequence
  Synthetic
DYYMH

SEQ ID NO: 3724 - protein, 17 aa, Artificial Sequence
  Synthetic
WINPNSGGPNYAQKFQG

SEQ ID NO: 3725 - protein, 12 aa, Artificial Sequence
  Synthetic
EKHAVAGIGFDY

SEQ ID NO: 3726 - protein, 11 aa, Artificial Sequence
  Synthetic
QASQDISNYLN

SEQ ID NO: 3727 - protein, 7 aa, Artificial Sequence
  Synthetic
AASSLES

SEQ ID NO: 3728 - protein, 9 aa, Artificial Sequence
  Synthetic
QQANSFPLT

SEQ ID NO: 3729 - protein, 121 aa, Artificial Sequence
  Synthetic
QVQLVQSGAEVKKPGASVKVSCKASGYTFTDYYMHWVRQAPGQCLEWMGWINPNSGGPNYAQKFQGRVTMTRDTSISTAHMELSRLRSDDTAVYYCAREKHAVAGIGFDYWGQGTLVTVSS

SEQ ID NO: 3730 - protein, 107 aa, Artificial Sequence
  Synthetic
DIQMTQSPSSVSASVGDRVTITCQASQDISNYLNWYQQKPGKAPKLLIYAASSLESGVPSRFSGSGSGTDFTLTISSLQPEDFATYYCQQANSFPLTFGCGTKVDIK

SEQ ID NO: 3731 - protein, 243 aa, Artificial Sequence
  Synthetic
QVQLVQSGAEVKKPGASVKVSCKASGYTFTDYYMHWVRQAPGQCLEWMGWINPNSGGPNYAQKFQGRVTMTRDTSISTAHMELSRLRSDDTAVYYCAREKHAVAGIGFDYWGQGTLVTVSSGGGGSGGGGSGGGGSDIQMTQSPSSVSASVGDRVTITCQASQDISNYLNWYQQKPGKAPKLLIYAASSLESGVPSRFSGSGSGTDFTLTISSLQPEDFATYYCQQANSFPLTFGCGTKVDIK

SEQ ID NO: 3732 - protein, 498 aa, Artificial Sequence
  Synthetic
QVQLVQSGAEVKKPGASVKVSCKASGYTFTDYYMHWVRQAPGQCLEWMGWINPNSGGPNYAQKFQGRVTMTRDTSISTAHMELSRLRSDDTAVYYCAREKHAVAGIGFDYWGQGTLVTVSSGGGGSGGGGSGGGGSDIQMTQSPSSVSASVGDRVTITCQASQDISNYLNWYQQKPGKAPKLLIYAASSLESGVPSRFSGSGSGTDFTLTISSLQPEDFATYYCQQANSFPLTFGCGTKVDIKSGGGGSEVQLVESGGGLVQPGGSLKLSCAASGFTFNKYAMNWVRQAPGKGLEWVARIRSKYNNYATYYADSVKDRFTISRDDSKNTAYLQMNNLKTEDTAVYYCVRHGNFGNSYISYWAYWGQGTLVTVSSGGGGSGGGGSGGGGSQTVVTQEPSLTVSPGGTVTLTCGSSTGAVTSGNYPNWVQQKPGQAPRGLIGGTKFLAPGTPARFSGSLLGGKAALTLSGVQPEDEAEYYCVLWYSNRWVFGGGTKLTVL

SEQ ID NO: 3733 - protein, 986 aa, Artificial Sequence
  Synthetic
QVQLVQSGAEVKKPGASVKVSCKASGYTFTDYYMHWVRQAPGQCLEWMGWINPNSGGPNYAQKFQGRVTMTRDTSISTAHMELSRLRSDDTAVYYCAREKHAVAGIGFDYWGQGTLVTVSSGGGGSGGGGSGGGGSDIQMTQSPSSVSASVGDRVTITCQASQDISNYLNWYQQKPGKAPKLLIYAASSLESGVPSRFSGSGSGTDFTLTISSLQPEDFATYYCQQANSFPLTFGCGTKVDIKSGGGGSEVQLVESGGGLVQPGGSLKLSCAASGFTFNKYAMNWVRQAPGKGLEWVARIRSKYNNYATYYADSVKDRFTISRDDSKNTAYLQMNNLKTEDTAVYYCVRHGNFGNSYISYWAYWGQGTLVTVSSGGGGSGGGGSGGGGSQTVVTQEPSLTVSPGGTVTLTCGSSTGAVTSGNYPNWVQQKPGQAPRGLIGGTKFLAPGTPARFSGSLLGGKAALTLSGVQPEDEAEYYCVLWYSNRWVFGGGTKLTVLGGGGDKTHTCPPCPAPELLGGPSVFLFPPKPKDTLMISRTPEVTCVVVDVSHEDPEVKFNWYVDGVEVHNAKTKPCEEQYGSTYRCVSVLTVLHQDWLNGKEYKCKVSNKALPAPIEKTISKAKGQPREPQVYTLPPSREEMTKNQVSLTCLVKGFYPSDIAVEWESNGQPENNYKTTPPVLDSDGSFFLYSKLTVDKSRWQQGNVFSCSVMHEALHNHYTQKSLSLSPGKGGGGSGGGGSGGGGSGGGGSGGGGSGGGGSDKTHTCPPCPAPELLGGPSVFLFPPKPKDTLMISRTPEVTCVVVDVSHEDPEVKFNWYVDGVEVHNAKTKPCEEQYGSTYRCVSVLTVLHQDWLNGKEYKCKVSNKALPAPIEKTISKAKGQPREPQVYTLPPSREEMTKNQVSLTCLVKGFYPSDIAVEWESNGQPENNYKTTPPVLDSDGSFFLYSKLTVDKSRWQQGNVFSCSVMHEALHNHYTQKSLSLSPGK

SEQ ID NO: 3734 - protein, 494 aa, Artificial Sequence
  Synthetic
QVQLVQSGAEVKKPGASVKVSCKASGYTFTDYYMHWVRQAPGQCLEWMGWINPNSGGPNYAQKFQGRVTMTRDTSISTAHMELSRLRSDDTAVYYCAREKHAVAGIGFDYWGQGTLVTVSSGGGGSGGGGSGGGGSDIQMTQSPSSVSASVGDRVTITCQASQDISNYLNWYQQKPGKAPKLLIYAASSLESGVPSRFSGSGSGTDFTLTISSLQPEDFATYYCQQANSFPLTFGCGTKVDIKSGGGGSQVTLKESGPTLVKPTETLTLTCTVSGFSFRNARMGVSWIRQPPGKCLEWLAHIFSNDEKSYSTSLKSRLTISKDTSKSQVVLTMTNMDPVDTATYFCARVPEYSSGWYRFDYWGQGTLVTVSSGGGGSGGGGSGGGGSDIQMTQSPSSLSASVGDRVTISCRASQSIRSYLNWYQQKPGKAPKLLIYATSSLQGGVPSRFSGSGSGTDFTLTISSLQPEDFATYYCQQSYSTPFTFGCGTKVEIK

SEQ ID NO: 3735 - protein, 749 aa, Artificial Sequence
  Synthetic
QVQLVQSGAEVKKPGASVKVSCKASGYTFTDYYMHWVRQAPGQCLEWMGWINPNSGGPNYAQKFQGRVTMTRDTSISTAHMELSRLRSDDTAVYYCAREKHAVAGIGFDYWGQGTLVTVSSGGGGSGGGGSGGGGSDIQMTQSPSSVSASVGDRVTITCQASQDISNYLNWYQQKPGKAPKLLIYAASSLESGVPSRFSGSGSGTDFTLTISSLQPEDFATYYCQQANSFPLTFGCGTKVDIKSGGGGSQVTLKESGPTLVKPTETLTLTCTVSGFSFRNARMGVSWIRQPPGKCLEWLAHIFSNDEKSYSTSLKSRLTISKDTSKSQVVLTMTNMDPVDTATYFCARVPEYSSGWYRFDYWGQGTLVTVSSGGGGSGGGGSGGGGSDIQMTQSPSSLSASVGDRVTISCRASQSIRSYLNWYQQKPGKAPKLLIYATSSLQGGVPSRFSGSGSGTDFTLTISSLQPEDFATYYCQQSYSTPFTFGCGTKVEIKSGGGGSEVQLVESGGGLVQPGGSLKLSCAASGFTFNKYAMNWVRQAPGKGLEWVARIRSKYNNYATYYADSVKDRFTISRDDSKNTAYLQMNNLKTEDTAVYYCVRHGNFGNSYISYWAYWGQGTLVTVSSGGGGSGGGGSGGGGSQTVVTQEPSLTVSPGGTVTLTCGSSTGAVTSGNYPNWVQQKPGQAPRGLIGGTKFLAPGTPARFSGSLLGGKAALTLSGVQPEDEAEYYCVLWYSNRWVFGGGTKLTVL

SEQ ID NO: 3736 - protein, 1237 aa, Artificial Sequence
  Synthetic
QVQLVQSGAEVKKPGASVKVSCKASGYTFTDYYMHWVRQAPGQCLEWMGWINPNSGGPNYAQKFQGRVTMTRDTSISTAHMELSRLRSDDTAVYYCAREKHAVAGIGFDYWGQGTLVTVSSGGGGSGGGGSGGGGSDIQMTQSPSSVSASVGDRVTITCQASQDISNYLNWYQQKPGKAPKLLIYAASSLESGVPSRFSGSGSGTDFTLTISSLQPEDFATYYCQQANSFPLTFGCGTKVDIKSGGGGSQVTLKESGPTLVKPTETLTLTCTVSGFSFRNARMGVSWIRQPPGKCLEWLAHIFSNDEKSYSTSLKSRLTISKDTSKSQVVLTMTNMDPVDTATYFCARVPEYSSGWYRFDYWGQGTLVTVSSGGGGSGGGGSGGGGSDIQMTQSPSSLSASVGDRVTISCRASQSIRSYLNWYQQKPGKAPKLLIYATSSLQGGVPSRFSGSGSGTDFTLTISSLQPEDFATYYCQQSYSTPFTFGCGTKVEIKSGGGGSEVQLVESGGGLVQPGGSLKLSCAASGFTFNKYAMNWVRQAPGKGLEWVARIRSKYNNYATYYADSVKDRFTISRDDSKNTAYLQMNNLKTEDTAVYYCVRHGNFGNSYISYWAYWGQGTLVTVSSGGGGSGGGGSGGGGSQTVVTQEPSLTVSPGGTVTLTCGSSTGAVTSGNYPNWVQQKPGQAPRGLIGGTKFLAPGTPARFSGSLLGGKAALTLSGVQPEDEAEYYCVLWYSNRWVFGGGTKLTVLGGGGDKTHTCPPCPAPELLGGPSVFLFPPKPKDTLMISRTPEVTCVVVDVSHEDPEVKFNWYVDGVEVHNAKTKPCEEQYGSTYRCVSVLTVLHQDWLNGKEYKCKVSNKALPAPIEKTISKAKGQPREPQVYTLPPSREEMTKNQVSLTCLVKGFYPSDIAVEWESNGQPENNYKTTPPVLDSDGSFFLYSKLTVDKSRWQQGNVFSCSVMHEALHNHYTQKSLSLSPGKGGGGSGGGGSGGGGSGGGGSGGGGSGGGGSDKTHTCPPCPAPELLGGPSVFLFPPKPKDTLMISRTPEVTCVVVDVSHEDPEVKFNWYVDGVEVHNAKTKPCEEQYGSTYRCVSVLTVLHQDWLNGKEYKCKVSNKALPAPIEKTISKAKGQPREPQVYTLPPSREEMTKNQVSLTCLVKGFYPSDIAVEWESNGQPENNYKTTPPVLDSDGSFFLYSKLTVDKSRWQQGNVFSCSVMHEALHNHYTQKSLSLSPGK

SEQ ID NO: 3737 - protein, 494 aa, Artificial Sequence
  Synthetic
QVTLKESGPTLVKPTETLTLTCTVSGFSFRNARMGVSWIRQPPGKCLEWLAHIFSNDEKSYSTSLKSRLTISKDTSKSQVVLTMTNMDPVDTATYFCARVPEYSSGWYRFDYWGQGTLVTVSSGGGGSGGGGSGGGGSDIQMTQSPSSLSASVGDRVTISCRASQSIRSYLNWYQQKPGKAPKLLIYATSSLQGGVPSRFSGSGSGTDFTLTISSLQPEDFATYYCQQSYSTPFTFGCGTKVEIKSGGGGSQVQLVQSGAEVKKPGASVKVSCKASGYTFTDYYMHWVRQAPGQCLEWMGWINPNSGGPNYAQKFQGRVTMTRDTSISTAHMELSRLRSDDTAVYYCAREKHAVAGIGFDYWGQGTLVTVSSGGGGSGGGGSGGGGSDIQMTQSPSSVSASVGDRVTITCQASQDISNYLNWYQQKPGKAPKLLIYAASSLESGVPSRFSGSGSGTDFTLTISSLQPEDFATYYCQQANSFPLTFGCGTKVDIK

SEQ ID NO: 3738 - protein, 749 aa, Artificial Sequence
  Synthetic
QVTLKESGPTLVKPTETLTLTCTVSGFSFRNARMGVSWIRQPPGKCLEWLAHIFSNDEKSYSTSLKSRLTISKDTSKSQVVLTMTNMDPVDTATYFCARVPEYSSGWYRFDYWGQGTLVTVSSGGGGSGGGGSGGGGSDIQMTQSPSSLSASVGDRVTISCRASQSIRSYLNWYQQKPGKAPKLLIYATSSLQGGVPSRFSGSGSGTDFTLTISSLQPEDFATYYCQQSYSTPFTFGCGTKVEIKSGGGGSQVQLVQSGAEVKKPGASVKVSCKASGYTFTDYYMHWVRQAPGQCLEWMGWINPNSGGPNYAQKFQGRVTMTRDTSISTAHMELSRLRSDDTAVYYCAREKHAVAGIGFDYWGQGTLVTVSSGGGGSGGGGSGGGGSDIQMTQSPSSVSASVGDRVTITCQASQDISNYLNWYQQKPGKAPKLLIYAASSLESGVPSRFSGSGSGTDFTLTISSLQPEDFATYYCQQANSFPLTFGCGTKVDIKSGGGGSEVQLVESGGGLVQPGGSLKLSCAASGFTFNKYAMNWVRQAPGKGLEWVARIRSKYNNYATYYADSVKDRFTISRDDSKNTAYLQMNNLKTEDTAVYYCVRHGNFGNSYISYWAYWGQGTLVTVSSGGGGSGGGGSGGGGSQTVVTQEPSLTVSPGGTVTLTCGSSTGAVTSGNYPNWVQQKPGQAPRGLIGGTKFLAPGTPARFSGSLLGGKAALTLSGVQPEDEAEYYCVLWYSNRWVFGGGTKLTVL

SEQ ID NO: 3739 - protein, 1237 aa, Artificial Sequence
  Synthetic
QVTLKESGPTLVKPTETLTLTCTVSGFSFRNARMGVSWIRQPPGKCLEWLAHIFSNDEKSYSTSLKSRLTISKDTSKSQVVLTMTNMDPVDTATYFCARVPEYSSGWYRFDYWGQGTLVTVSSGGGGSGGGGSGGGGSDIQMTQSPSSLSASVGDRVTISCRASQSIRSYLNWYQQKPGKAPKLLIYATSSLQGGVPSRFSGSGSGTDFTLTISSLQPEDFATYYCQQSYSTPFTFGCGTKVEIKSGGGGSQVQLVQSGAEVKKPGASVKVSCKASGYTFTDYYMHWVRQAPGQCLEWMGWINPNSGGPNYAQKFQGRVTMTRDTSISTAHMELSRLRSDDTAVYYCAREKHAVAGIGFDYWGQGTLVTVSSGGGGSGGGGSGGGGSDIQMTQSPSSVSASVGDRVTITCQASQDISNYLNWYQQKPGKAPKLLIYAASSLESGVPSRFSGSGSGTDFTLTISSLQPEDFATYYCQQANSFPLTFGCGTKVDIKSGGGGSEVQLVESGGGLVQPGGSLKLSCAASGFTFNKYAMNWVRQAPGKGLEWVARIRSKYNNYATYYADSVKDRFTISRDDSKNTAYLQMNNLKTEDTAVYYCVRHGNFGNSYISYWAYWGQGTLVTVSSGGGGSGGGGSGGGGSQTVVTQEPSLTVSPGGTVTLTCGSSTGAVTSGNYPNWVQQKPGQAPRGLIGGTKFLAPGTPARFSGSLLGGKAALTLSGVQPEDEAEYYCVLWYSNRWVFGGGTKLTVLGGGGDKTHTCPPCPAPELLGGPSVFLFPPKPKDTLMISRTPEVTCVVVDVSHEDPEVKFNWYVDGVEVHNAKTKPCEEQYGSTYRCVSVLTVLHQDWLNGKEYKCKVSNKALPAPIEKTISKAKGQPREPQVYTLPPSREEMTKNQVSLTCLVKGFYPSDIAVEWESNGQPENNYKTTPPVLDSDGSFFLYSKLTVDKSRWQQGNVFSCSVMHEALHNHYTQKSLSLSPGKGGGGSGGGGSGGGGSGGGGSGGGGSGGGGSDKTHTCPPCPAPELLGGPSVFLFPPKPKDTLMISRTPEVTCVVVDVSHEDPEVKFNWYVDGVEVHNAKTKPCEEQYGSTYRCVSVLTVLHQDWLNGKEYKCKVSNKALPAPIEKTISKAKGQPREPQVYTLPPSREEMTKNQVSLTCLVKGFYPSDIAVEWESNGQPENNYKTTPPVLDSDGSFFLYSKLTVDKSRWQQGNVFSCSVMHEALHNHYTQKSLSLSPGK

SEQ ID NO: 3740 - protein, 499 aa, Artificial Sequence
  Synthetic
QVTLKESGPTLVKPTETLTLTCTLSGFSLNNARMGVSWIRQPPGKCLEWLAHIFSNDEKSYSTSLKNRLTISKDSSKTQVVLTMTNVDPVDTATYYCARIVGYGSGWYGFFDYWGQGTLVTVSSGGGGQGGGGQGGGGQEIQMTQSPSSLSASVGDRVTITCRASQGIRNDLGWYQQKPGKAPKRLIYAASTLQSGVPSRFSGSGSGTEFTLTISSLQPEDFATYYCLQHNSYPLTFGCGTKVEIKSGGGGQEVQLLESGGGLVQPGGSLRLSCAASGFTFSHYAMSWVRQAPGKCLEWVSAVSGGGDKTLYADAVKGRFTISRDNSKNTLFLQMNSLRAEDTAIYYCARLRGFYYGMDVWGQGTTVTVSSGGGGQGGGGQGGGGQEIVLTQSPLSLPVTPGEPASISCRSSQSLLHSNKYNYLDWYLQKPGQSPQLLIYLGSNRASGVPDRFSGSGSGTDFTLKISRVEAEDVGVYYCMQALQTPPITFGCGTRLEIK

SEQ ID NO: 3741 - protein, 754 aa, Artificial Sequence
  Synthetic
QVTLKESGPTLVKPTETLTLTCTLSGFSLNNARMGVSWIRQPPGKCLEWLAHIFSNDEKSYSTSLKNRLTISKDSSKTQVVLTMTNVDPVDTATYYCARIVGYGSGWYGFFDYWGQGTLVTVSSGGGGQGGGGQGGGGQEIQMTQSPSSLSASVGDRVTITCRASQGIRNDLGWYQQKPGKAPKRLIYAASTLQSGVPSRFSGSGSGTEFTLTISSLQPEDFATYYCLQHNSYPLTFGCGTKVEIKSGGGGQEVQLLESGGGLVQPGGSLRLSCAASGFTFSHYAMSWVRQAPGKCLEWVSAVSGGGDKTLYADAVKGRFTISRDNSKNTLFLQMNSLRAEDTAIYYCARLRGFYYGMDVWGQGTTVTVSSGGGGQGGGGQGGGGQEIVLTQSPLSLPVTPGEPASISCRSSQSLLHSNKYNYLDWYLQKPGQSPQLLIYLGSNRASGVPDRFSGSGSGTDFTLKISRVEAEDVGVYYCMQALQTPPITFGCGTRLEIKSGGGGQEVQLVESGGGLVQPGGSLKLSCAASGFTFNKYAMNWVRQAPGKGLEWVARIRSKYNNYATYYADSVKDRFTISRDDSKNTAYLQMNNLKTEDTAVYYCVRHGNFGNSYISYWAYWGQGTLVTVSSGGGGQGGGGQGGGGQQTVVTQEPSLTVSPGGTVTLTCGSSTGAVTSGNYPNWVQQKPGQAPRGLIGGTKFLAPGTPARFSGSLLGGKAALTLSGVQPEDEAEYYCVLWYSNRWVFGGGTKLTVL

SEQ ID NO: 3742 - protein, 754 aa, Artificial Sequence
  Synthetic
QVTLKESGPTLVKPTETLTLTCTLSGFSLNNARMGVSWIRQPPGKCLEWLAHIFSNDEKSYSTSLKNRLTISKDSSKTQVVLTMTNVDPVDTATYYCARIVGYGSGWYGFFDYWGQGTLVTVSSGGGGSGGGGSGGGGSDIQMTQSPSSLSASVGDRVTITCRASQGIRNDLGWYQQKPGKAPKRLIYAASTLQSGVPSRFSGSGSGTEFTLTISSLQPEDFATYYCLQHNSYPLTFGCGTKVEIKSGGGGSEVQLLESGGGLVQPGGSLRLSCAASGFTFSHYAMSWVRQAPGKCLEWVSAVSGGGDKTLYADAVKGRFTISRDNSKNTLFLQMNSLRAEDTAIYYCARLRGFYYGMDVWGQGTTVTVSSGGGGSGGGGSGGGGSDIVLTQSPLSLPVTPGEPASISCRSSQSLLHSNKYNYLDWYLQKPGQSPQLLIYLGSNRASGVPDRFSGSGSGTDFTLKISRVEAEDVGVYYCMQALQTPPITFGCGTRLEIKSGGGGSEVQLVESGGGLVQPGGSLKLSCAASGFTFNKYAINWVRQAPGKGLEWVARIRSKYNNYATYYADAVKDRFTISRDDSKNTVYLQMNNLKTEDTAVYYCARAGNFGSSYISYWAYWGQGTLVTVSSGGGGSGGGGSGGGGSQTVVTQEPSLTVSPGGTVTITCGSSTGAVTSGNYPNWVQKKPGQAPRGLIGGTKFLAPGTPARFSGSLSGGKAALTLSGVQPEDEAEYYCVLWYSNRWVFGSGTKLTVL

SEQ ID NO: 3743 - protein, 754 aa, Artificial Sequence
  Synthetic
QVTLKESGPTLVKPTETLTLTCTLSGFSLNNARMGVSWIRQPPGKCLEWLAHIFSNDEKSYSTSLKNRLTISKDSSKTQVVLTMTNVDPVDTATYYCARIVGYGSGWYGFFDYWGQGTLVTVSSGGGGQGGGGQGGGGQEIQMTQSPSSLSASVGDRVTITCRASQGIRNDLGWYQQKPGKAPKRLIYAASTLQSGVPSRFSGSGSGTEFTLTISSLQPEDFATYYCLQHNSYPLTFGCGTKVEIKSGGGGQEVQLLESGGGLVQPGGSLRLSCAASGFTFSHYAMSWVRQAPGKCLEWVSAVSGGGDKTLYADAVKGRFTISRDNSKNTLFLQMNSLRAEDTAIYYCARLRGFYYGMDVWGQGTTVTVSSGGGGQGGGGQGGGGQEIVLTQSPLSLPVTPGEPASISCRSSQSLLHSNKYNYLDWYLQKPGQSPQLLIYLGSNRASGVPDRFSGSGSGTDFTLKISRVEAEDVGVYYCMQALQTPPITFGCGTRLEIKSGGGGQEVQLVESGGGLVQPGGSLKLSCAASGFTFNKYAINWVRQAPGKGLEWVARIRSKYNNYATYYADAVKDRFTISRDDSKNTVYLQMNNLKTEDTAVYYCARAGNFGSSYISYWAYWGQGTLVTVSSGGGGQGGGGQGGGGQQTVVTQEPSLTVSPGGTVTITCGSSTGAVTSGNYPNWVQKKPGQAPRGLIGGTKFLAPGTPARFSGSLSGGKAALTLSGVQPEDEAEYYCVLWYSNRWVFGSGTKLTVL

SEQ ID NO: 3744 - protein, 1232 aa, Artificial Sequence
  Synthetic
QVTLKESGPTLVKPTETLTLTCTLSGFSLNNARMGVSWIRQPPGKCLEWLAHIFSNDEKSYSTSLKNRLTISKDSSKTQVVLTMTNVDPVDTATYYCARIVGYGSGWYGFFDYWGQGTLVTVSSGGGGQGGGGQGGGGQEIQMTQSPSSLSASVGDRVTITCRASQGIRNDLGWYQQKPGKAPKRLIYAASTLQSGVPSRFSGSGSGTEFTLTISSLQPEDFATYYCLQHNSYPLTFGCGTKVEIKSGGGGQEVQLLESGGGLVQPGGSLRLSCAASGFTFSHYAMSWVRQAPGKCLEWVSAVSGGGDKTLYADAVKGRFTISRDNSKNTLFLQMNSLRAEDTAIYYCARLRGFYYGMDVWGQGTTVTVSSGGGGQGGGGQGGGGQEIVLTQSPLSLPVTPGEPASISCRSSQSLLHSNKYNYLDWYLQKPGQSPQLLIYLGSNRASGVPDRFSGSGSGTDFTLKISRVEAEDVGVYYCMQALQTPPITFGCGTRLEIKSGGGGQEVQLVESGGGLVQPGGSLKLSCAASGFTFNKYAMNWVRQAPGKGLEWVARIRSKYNNYATYYADSVKDRFTISRDDSKNTAYLQMNNLKTEDTAVYYCVRHGNFGNSYISYWAYWGQGTLVTVSSGGGGQGGGGQGGGGQQTVVTQEPSLTVSPGGTVTLTCGSSTGAVTSGNYPNWVQQKPGQAPRGLIGGTKFLAPGTPARFSGSLLGGKAALTLSGVQPEDEAEYYCVLWYSNRWVFGGGTKLTVLGGGGCPPCPAPELLGGPSVFLFPPKPKDTLMISRTPEVTCVVVDVSHEEPEVKFNWYVDGVEVHNAKTKPCEEQYGSTYRCVSVLTVLHQDWLNGKEYKCKVSNKALPAPIEKTISKAKGQPREPQVYTLPPSREEMTKNQVSLTCLVKGFYPSDIAVEWESNGQPENNYKTTPPVLDSDGSFFLYSKLTVDKSRWQQGNVFSCSVMHEALHNHYTQKSLSLSPGKGGGGQGGGGQGGGGQGGGGQGGGGQGGGGQCPPCPAPELLGGPSVFLFPPKPKDTLMISRTPEVTCVVVDVSHEEPEVKFNWYVDGVEVHNAKTKPCEEQYGSTYRCVSVLTVLHQDWLNGKEYKCKVSNKALPAPIEKTISKAKGQPREPQVYTLPPSREEMTKNQVSLTCLVKGFYPSDIAVEWESNGQPENNYKTTPPVLDSDGSFFLYSKLTVDKSRWQQGNVFSCSVMHEALHNHYTQKSLSLSPGK

SEQ ID NO: 3745 - protein, 1242 aa, Artificial Sequence
  Synthetic
QVTLKESGPTLVKPTETLTLTCTLSGFSLNNARMGVSWIRQPPGKCLEWLAHIFSNDEKSYSTSLKNRLTISKDSSKTQVVLTMTNVDPVDTATYYCARIVGYGSGWYGFFDYWGQGTLVTVSSGGGGSGGGGSGGGGSDIQMTQSPSSLSASVGDRVTITCRASQGIRNDLGWYQQKPGKAPKRLIYAASTLQSGVPSRFSGSGSGTEFTLTISSLQPEDFATYYCLQHNSYPLTFGCGTKVEIKSGGGGSEVQLLESGGGLVQPGGSLRLSCAASGFTFSHYAMSWVRQAPGKCLEWVSAVSGGGDKTLYADAVKGRFTISRDNSKNTLFLQMNSLRAEDTAIYYCARLRGFYYGMDVWGQGTTVTVSSGGGGSGGGGSGGGGSDIVLTQSPLSLPVTPGEPASISCRSSQSLLHSNKYNYLDWYLQKPGQSPQLLIYLGSNRASGVPDRFSGSGSGTDFTLKISRVEAEDVGVYYCMQALQTPPITFGCGTRLEIKSGGGGSEVQLVESGGGLVQPGGSLKLSCAASGFTFNKYAINWVRQAPGKGLEWVARIRSKYNNYATYYADAVKDRFTISRDDSKNTVYLQMNNLKTEDTAVYYCARAGNFGSSYISYWAYWGQGTLVTVSSGGGGSGGGGSGGGGSQTVVTQEPSLTVSPGGTVTITCGSSTGAVTSGNYPNWVQKKPGQAPRGLIGGTKFLAPGTPARFSGSLSGGKAALTLSGVQPEDEAEYYCVLWYSNRWVFGSGTKLTVLGGGGDKTHTCPPCPAPELLGGPSVFLFPPKPKDTLMISRTPEVTCVVVDVSHEDPEVKFNWYVDGVEVHNAKTKPCEEQYGSTYRCVSVLTVLHQDWLNGKEYKCKVSNKALPAPIEKTISKAKGQPREPQVYTLPPSREEMTKNQVSLTCLVKGFYPSDIAVEWESNGQPENNYKTTPPVLDSDGSFFLYSKLTVDKSRWQQGNVFSCSVMHEALHNHYTQKSLSLSPGKGGGGSGGGGSGGGGSGGGGSGGGGSGGGGSDKTHTCPPCPAPELLGGPSVFLFPPKPKDTLMISRTPEVTCVVVDVSHEDPEVKFNWYVDGVEVHNAKTKPCEEQYGSTYRCVSVLTVLHQDWLNGKEYKCKVSNKALPAPIEKTISKAKGQPREPQVYTLPPSREEMTKNQVSLTCLVKGFYPSDIAVEWESNGQPENNYKTTPPVLDSDGSFFLYSKLTVDKSRWQQGNVFSCSVMHEALHNHYTQKSLSLSPGK

SEQ ID NO: 3746 - protein, 1232 aa, Artificial Sequence
  Synthetic
QVTLKESGPTLVKPTETLTLTCTLSGFSLNNARMGVSWIRQPPGKCLEWLAHIFSNDEKSYSTSLKNRLTISKDSSKTQVVLTMTNVDPVDTATYYCARIVGYGSGWYGFFDYWGQGTLVTVSSGGGGQGGGGQGGGGQEIQMTQSPSSLSASVGDRVTITCRASQGIRNDLGWYQQKPGKAPKRLIYAASTLQSGVPSRFSGSGSGTEFTLTISSLQPEDFATYYCLQHNSYPLTFGCGTKVEIKSGGGGQEVQLLESGGGLVQPGGSLRLSCAASGFTFSHYAMSWVRQAPGKCLEWVSAVSGGGDKTLYADAVKGRFTISRDNSKNTLFLQMNSLRAEDTAIYYCARLRGFYYGMDVWGQGTTVTVSSGGGGQGGGGQGGGGQEIVLTQSPLSLPVTPGEPASISCRSSQSLLHSNKYNYLDWYLQKPGQSPQLLIYLGSNRASGVPDRFSGSGSGTDFTLKISRVEAEDVGVYYCMQALQTPPITFGCGTRLEIKSGGGGQEVQLVESGGGLVQPGGSLKLSCAASGFTFNKYAINWVRQAPGKGLEWVARIRSKYNNYATYYADAVKDRFTISRDDSKNTVYLQMNNLKTEDTAVYYCARAGNFGSSYISYWAYWGQGTLVTVSSGGGGQGGGGQGGGGQQTVVTQEPSLTVSPGGTVTITCGSSTGAVTSGNYPNWVQKKPGQAPRGLIGGTKFLAPGTPARFSGSLSGGKAALTLSGVQPEDEAEYYCVLWYSNRWVFGSGTKLTVLGGGGCPPCPAPELLGGPSVFLFPPKPKDTLMISRTPEVTCVVVDVSHEEPEVKFNWYVDGVEVHNAKTKPCEEQYGSTYRCVSVLTVLHQDWLNGKEYKCKVSNKALPAPIEKTISKAKGQPREPQVYTLPPSREEMTKNQVSLTCLVKGFYPSDIAVEWESNGQPENNYKTTPPVLDSDGSFFLYSKLTVDKSRWQQGNVFSCSVMHEALHNHYTQKSLSLSPGKGGGGQGGGGQGGGGQGGGGQGGGGQGGGGQCPPCPAPELLGGPSVFLFPPKPKDTLMISRTPEVTCVVVDVSHEEPEVKFNWYVDGVEVHNAKTKPCEEQYGSTYRCVSVLTVLHQDWLNGKEYKCKVSNKALPAPIEKTISKAKGQPREPQVYTLPPSREEMTKNQVSLTCLVKGFYPSDIAVEWESNGQPENNYKTTPPVLDSDGSFFLYSKLTVDKSRWQQGNVFSCSVMHEALHNHYTQKSLSLSPGK

SEQ ID NO: 3747 - protein, 1247 aa, Artificial Sequence
  Synthetic
QVTLKESGPTLVKPTETLTLTCTLSGFSLNNARMGVSWIRQPPGKCLEWLAHIFSNDEKSYSTSLKNRLTISKDSSKTQVVLTMTNVDPVDTATYYCARIVGYGSGWYGFFDYWGQGTLVTVSSGGGGSGGGGSGGGGSDIQMTQSPSSLSASVGDRVTITCRASQGIRNDLGWYQQKPGKAPKRLIYAASTLQSGVPSRFSGSGSGTEFTLTISSLQPEDFATYYCLQHNSYPLTFGCGTKVEIKSGGGGSGGGGSEVQLLESGGGLVQPGGSLRLSCAASGFTFSHYAMSWVRQAPGKCLEWVSAVSGGGDKTLYADAVKGRFTISRDNSKNTLFLQMNSLRAEDTAIYYCARLRGFYYGMDVWGQGTTVTVSSGGGGSGGGGSGGGGSDIVLTQSPLSLPVTPGEPASISCRSSQSLLHSNKYNYLDWYLQKPGQSPQLLIYLGSNRASGVPDRFSGSGSGTDFTLKISRVEAEDVGVYYCMQALQTPPITFGCGTRLEIKSGGGGSEVQLVESGGGLVQPGGSLKLSCAASGFTFNKYAMNWVRQAPGKGLEWVARIRSKYNNYATYYADSVKDRFTISRDDSKNTAYLQMNNLKTEDTAVYYCVRHGNFGNSYISYWAYWGQGTLVTVSSGGGGSGGGGSGGGGSQTVVTQEPSLTVSPGGTVTLTCGSSTGAVTSGNYPNWVQQKPGQAPRGLIGGTKFLAPGTPARFSGSLLGGKAALTLSGVQPEDEAEYYCVLWYSNRWVFGGGTKLTVLGGGGDKTHTCPPCPAPELLGGPSVFLFPPKPKDTLMISRTPEVTCVVVDVSHEDPEVKFNWYVDGVEVHNAKTKPCEEQYGSTYRCVSVLTVLHQDWLNGKEYKCKVSNKALPAPIEKTISKAKGQPREPQVYTLPPSREEMTKNQVSLTCLVKGFYPSDIAVEWESNGQPENNYKTTPPVLDSDGSFFLYSKLTVDKSRWQQGNVFSCSVMHEALHNHYTQKSLSLSPGKGGGGSGGGGSGGGGSGGGGSGGGGSGGGGSDKTHTCPPCPAPELLGGPSVFLFPPKPKDTLMISRTPEVTCVVVDVSHEDPEVKFNWYVDGVEVHNAKTKPCEEQYGSTYRCVSVLTVLHQDWLNGKEYKCKVSNKALPAPIEKTISKAKGQPREPQVYTLPPSREEMTKNQVSLTCLVKGFYPSDIAVEWESNGQPENNYKTTPPVLDSDGSFFLYSKLTVDKSRWQQGNVFSCSVMHEALHNHYTQKSLSLSPGK

SEQ ID NO: 3748 - protein, 1252 aa, Artificial Sequence
  Synthetic
QVTLKESGPTLVKPTETLTLTCTLSGFSLNNARMGVSWIRQPPGKCLEWLAHIFSNDEKSYSTSLKNRLTISKDSSKTQVVLTMTNVDPVDTATYYCARIVGYGSGWYGFFDYWGQGTLVTVSSGGGGSGGGGSGGGGSDIQMTQSPSSLSASVGDRVTITCRASQGIRNDLGWYQQKPGKAPKRLIYAASTLQSGVPSRFSGSGSGTEFTLTISSLQPEDFATYYCLQHNSYPLTFGCGTKVEIKSGGGGSGGGGSGGGGSEVQLLESGGGLVQPGGSLRLSCAASGFTFSHYAMSWVRQAPGKCLEWVSAVSGGGDKTLYADAVKGRFTISRDNSKNTLFLQMNSLRAEDTAIYYCARLRGFYYGMDVWGQGTTVTVSSGGGGSGGGGSGGGGSDIVLTQSPLSLPVTPGEPASISCRSSQSLLHSNKYNYLDWYLQKPGQSPQLLIYLGSNRASGVPDRFSGSGSGTDFTLKISRVEAEDVGVYYCMQALQTPPITFGCGTRLEIKSGGGGSEVQLVESGGGLVQPGGSLKLSCAASGFTFNKYAMNWVRQAPGKGLEWVARIRSKYNNYATYYADSVKDRFTISRDDSKNTAYLQMNNLKTEDTAVYYCVRHGNFGNSYISYWAYWGQGTLVTVSSGGGGSGGGGSGGGGSQTVVTQEPSLTVSPGGTVTLTCGSSTGAVTSGNYPNWVQQKPGQAPRGLIGGTKFLAPGTPARFSGSLLGGKAALTLSGVQPEDEAEYYCVLWYSNRWVFGGGTKLTVLGGGGDKTHTCPPCPAPELLGGPSVFLFPPKPKDTLMISRTPEVTCVVVDVSHEDPEVKFNWYVDGVEVHNAKTKPCEEQYGSTYRCVSVLTVLHQDWLNGKEYKCKVSNKALPAPIEKTISKAKGQPREPQVYTLPPSREEMTKNQVSLTCLVKGFYPSDIAVEWESNGQPENNYKTTPPVLDSDGSFFLYSKLTVDKSRWQQGNVFSCSVMHEALHNHYTQKSLSLSPGKGGGGSGGGGSGGGGSGGGGSGGGGSGGGGSDKTHTCPPCPAPELLGGPSVFLFPPKPKDTLMISRTPEVTCVVVDVSHEDPEVKFNWYVDGVEVHNAKTKPCEEQYGSTYRCVSVLTVLHQDWLNGKEYKCKVSNKALPAPIEKTISKAKGQPREPQVYTLPPSREEMTKNQVSLTCLVKGFYPSDIAVEWESNGQPENNYKTTPPVLDSDGSFFLYSKLTVDKSRWQQGNVFSCSVMHEALHNHYTQKSLSLSPGK

SEQ ID NO: 3749 - protein, 491 aa, Artificial Sequence
  Synthetic
DIQMTQSPSSLSASVGDRVTITCKASQDVSTAVAWYQQKPGKAPKLLIYSASYRYTGVPDRFTGSGSGTDFTLTISSLQPEDFATYYCQQHYSTPPYTFGCGTKVEIKGGGGQGGGGQGGGGQQVQLVQSGAEVKKPGASVKVSCKASGYAFSSSWMNWVRQAPGQCLEWIGRIYPGDADAKYNAKFKGKATLTADKSTSTAYMELSSLRSEDTAVYYCARSTMIATGAMDYWGQGTLVTVSSGGGGQQVQLVQSGAEVKKPGASVKVSCKASGYTFTNHIIHWVRQAPGQCLEWMGYINPYPGYHAYNEKFQGRATMTSDTSTSTVYMELSSLRSEDTAVYYCARDGYYRDTDVLDYWGQGTLVTVSSGGGGQGGGGQGGGGQEIQMTQSPSSLSASVGDRVTITCQASQDISNYLNWYQQKPGKAPKLLIYYTSRLHTGVPSRFSGSGSGTDFTFTISSLEPEDIATYYCQQGNTLPWTFGCGTKVEIK

SEQ ID NO: 3750 - protein, 491 aa, Artificial Sequence
  Synthetic
EIQMTQSPSSLSASVGDRVTITCKASQDVSTAVAWYQQKPGKAPKLLIYSASYRYTGVPDRFTGSGSGTDFTLTISSLQPEDFATYYCQQHYSTPPYTFGCGTKVEIKGGGGQGGGGQGGGGQQVQLVQSGAEVKKPGASVKVSCKASGYAFSSSWMNWVRQAPGQCLEWIGRIYPGDADAKYNAKFKGKATLTADKSTSTAYMELSSLRSEDTAVYYCARSTMIATGAMDYWGQGTLVTVSSGGGGQQVQLVQSGAEVKKPGASVKVSCKASGYTFTNHIIHWVRQAPGQCLEWMGYINPYPGYHAYNEKFQGRATMTSDTSTSTVYMELSSLRSEDTAVYYCARDGYYRDTDVLDYWGQGTLVTVSSGGGGQGGGGQGGGGQEIQMTQSPSSLSASVGDRVTITCQASQDISNYLNWYQQKPGKAPKLLIYYTSRLHTGVPSRFSGSGSGTDFTFTISSLEPEDIATYYCQQGNTLPWTFGCGTKVEIK

SEQ ID NO: 3751 - protein, 746 aa, Artificial Sequence
  Synthetic
DIQMTQSPSSLSASVGDRVTITCKASQDVSTAVAWYQQKPGKAPKLLIYSASYRYTGVPDRFTGSGSGTDFTLTISSLQPEDFATYYCQQHYSTPPYTFGCGTKVEIKGGGGQGGGGQGGGGQQVQLVQSGAEVKKPGASVKVSCKASGYAFSSSWMNWVRQAPGQCLEWIGRIYPGDADAKYNAKFKGKATLTADKSTSTAYMELSSLRSEDTAVYYCARSTMIATGAMDYWGQGTLVTVSSGGGGQQVQLVQSGAEVKKPGASVKVSCKASGYTFTNHIIHWVRQAPGQCLEWMGYINPYPGYHAYNEKFQGRATMTSDTSTSTVYMELSSLRSEDTAVYYCARDGYYRDTDVLDYWGQGTLVTVSSGGGGQGGGGQGGGGQEIQMTQSPSSLSASVGDRVTITCQASQDISNYLNWYQQKPGKAPKLLIYYTSRLHTGVPSRFSGSGSGTDFTFTISSLEPEDIATYYCQQGNTLPWTFGCGTKVEIKSGGGGQEVQLVESGGGLVQPGGSLKLSCAASGFTFNKYAMNWVRQAPGKGLEWVARIRSKYNNYATYYADSVKDRFTISRDDSKNTAYLQMNNLKTEDTAVYYCVRHGNFGNSYISYWAYWGQGTLVTVSSGGGGQGGGGQGGGGQQTVVTQEPSLTVSPGGTVTLTCGSSTGAVTSGNYPNWVQQKPGQAPRGLIGGTKFLAPGTPARFSGSLLGGKAALTLSGVQPEDEAEYYCVLWYSNRWVFGGGTKLTVL

SEQ ID NO: 3752 - protein, 746 aa, Artificial Sequence
  Synthetic
EIQMTQSPSSLSASVGDRVTITCKASQDVSTAVAWYQQKPGKAPKLLIYSASYRYTGVPDRFTGSGSGTDFTLTISSLQPEDFATYYCQQHYSTPPYTFGCGTKVEIKGGGGQGGGGQGGGGQQVQLVQSGAEVKKPGASVKVSCKASGYAFSSSWMNWVRQAPGQCLEWIGRIYPGDADAKYNAKFKGKATLTADKSTSTAYMELSSLRSEDTAVYYCARSTMIATGAMDYWGQGTLVTVSSGGGGQQVQLVQSGAEVKKPGASVKVSCKASGYTFTNHIIHWVRQAPGQCLEWMGYINPYPGYHAYNEKFQGRATMTSDTSTSTVYMELSSLRSEDTAVYYCARDGYYRDTDVLDYWGQGTLVTVSSGGGGQGGGGQGGGGQEIQMTQSPSSLSASVGDRVTITCQASQDISNYLNWYQQKPGKAPKLLIYYTSRLHTGVPSRFSGSGSGTDFTFTISSLEPEDIATYYCQQGNTLPWTFGCGTKVEIKSGGGGQEVQLVESGGGLVQPGGSLKLSCAASGFTFNKYAMNWVRQAPGKGLEWVARIRSKYNNYATYYADSVKDRFTISRDDSKNTAYLQMNNLKTEDTAVYYCVRHGNFGNSYISYWAYWGQGTLVTVSSGGGGQGGGGQGGGGQQTVVTQEPSLTVSPGGTVTLTCGSSTGAVTSGNYPNWVQQKPGQAPRGLIGGTKFLAPGTPARFSGSLLGGKAALTLSGVQPEDEAEYYCVLWYSNRWVFGGGTKLTVL

SEQ ID NO: 3753 - protein, 746 aa, Artificial Sequence
  Synthetic
DIQMTQSPSSLSASVGDRVTITCKASQDVSTAVAWYQQKPGKAPKLLIYSASYRYTGVPDRFTGSGSGTDFTLTISSLQPEDFATYYCQQHYSTPPYTFGCGTKVEIKGGGGSGGGGSGGGGSQVQLVQSGAEVKKPGASVKVSCKASGYAFSSSWMNWVRQAPGQCLEWIGRIYPGDADAKYNAKFKGKATLTADKSTSTAYMELSSLRSEDTAVYYCARSTMIATGAMDYWGQGTLVTVSSGGGGSQVQLVQSGAEVKKPGASVKVSCKASGYTFTNHIIHWVRQAPGQCLEWMGYINPYPGYHAYNEKFQGRATMTSDTSTSTVYMELSSLRSEDTAVYYCARDGYYRDTDVLDYWGQGTLVTVSSGGGGSGGGGSGGGGSDIQMTQSPSSLSASVGDRVTITCQASQDISNYLNWYQQKPGKAPKLLIYYTSRLHTGVPSRFSGSGSGTDFTFTISSLEPEDIATYYCQQGNTLPWTFGCGTKVEIKSGGGGSEVQLVESGGGLVQPGGSLKLSCAASGFTFNKYAINWVRQAPGKGLEWVARIRSKYNNYATYYADAVKDRFTISRDDSKNTVYLQMNNLKTEDTAVYYCARAGNFGSSYISYWAYWGQGTLVTVSSGGGGSGGGGSGGGGSQTVVTQEPSLTVSPGGTVTITCGSSTGAVTSGNYPNWVQKKPGQAPRGLIGGTKFLAPGTPARFSGSLSGGKAALTLSGVQPEDEAEYYCVLWYSNRWVFGSGTKLTVL

SEQ ID NO: 3754 - protein, 746 aa, Artificial Sequence
  Synthetic
DIQMTQSPSSLSASVGDRVTITCKASQDVSTAVAWYQQKPGKAPKLLIYSASYRYTGVPDRFTGSGSGTDFTLTISSLQPEDFATYYCQQHYSTPPYTFGCGTKVEIKGGGGQGGGGQGGGGQQVQLVQSGAEVKKPGASVKVSCKASGYAFSSSWMNWVRQAPGQCLEWIGRIYPGDADAKYNAKFKGKATLTADKSTSTAYMELSSLRSEDTAVYYCARSTMIATGAMDYWGQGTLVTVSSGGGGQQVQLVQSGAEVKKPGASVKVSCKASGYTFTNHIIHWVRQAPGQCLEWMGYINPYPGYHAYNEKFQGRATMTSDTSTSTVYMELSSLRSEDTAVYYCARDGYYRDTDVLDYWGQGTLVTVSSGGGGQGGGGQGGGGQEIQMTQSPSSLSASVGDRVTITCQASQDISNYLNWYQQKPGKAPKLLIYYTSRLHTGVPSRFSGSGSGTDFTFTISSLEPEDIATYYCQQGNTLPWTFGCGTKVEIKSGGGGQEVQLVESGGGLVQPGGSLKLSCAASGFTFNKYAINWVRQAPGKGLEWVARIRSKYNNYATYYADAVKDRFTISRDDSKNTVYLQMNNLKTEDTAVYYCARAGNFGSSYISYWAYWGQGTLVTVSSGGGGQGGGGQGGGGQQTVVTQEPSLTVSPGGTVTITCGSSTGAVTSGNYPNWVQKKPGQAPRGLIGGTKFLAPGTPARFSGSLSGGKAALTLSGVQPEDEAEYYCVLWYSNRWVFGSGTKLTVL

SEQ ID NO: 3755 - protein, 746 aa, Artificial Sequence
  Synthetic
EIQMTQSPSSLSASVGDRVTITCKASQDVSTAVAWYQQKPGKAPKLLIYSASYRYTGVPDRFTGSGSGTDFTLTISSLQPEDFATYYCQQHYSTPPYTFGCGTKVEIKGGGGQGGGGQGGGGQQVQLVQSGAEVKKPGASVKVSCKASGYAFSSSWMNWVRQAPGQCLEWIGRIYPGDADAKYNAKFKGKATLTADKSTSTAYMELSSLRSEDTAVYYCARSTMIATGAMDYWGQGTLVTVSSGGGGQQVQLVQSGAEVKKPGASVKVSCKASGYTFTNHIIHWVRQAPGQCLEWMGYINPYPGYHAYNEKFQGRATMTSDTSTSTVYMELSSLRSEDTAVYYCARDGYYRDTDVLDYWGQGTLVTVSSGGGGQGGGGQGGGGQEIQMTQSPSSLSASVGDRVTITCQASQDISNYLNWYQQKPGKAPKLLIYYTSRLHTGVPSRFSGSGSGTDFTFTISSLEPEDIATYYCQQGNTLPWTFGCGTKVEIKSGGGGQEVQLVESGGGLVQPGGSLKLSCAASGFTFNKYAINWVRQAPGKGLEWVARIRSKYNNYATYYADAVKDRFTISRDDSKNTVYLQMNNLKTEDTAVYYCARAGNFGSSYISYWAYWGQGTLVTVSSGGGGQGGGGQGGGGQQTVVTQEPSLTVSPGGTVTITCGSSTGAVTSGNYPNWVQKKPGQAPRGLIGGTKFLAPGTPARFSGSLSGGKAALTLSGVQPEDEAEYYCVLWYSNRWVFGSGTKLTVL

SEQ ID NO: 3756 - protein, 1224 aa, Artificial Sequence
  Synthetic
DIQMTQSPSSLSASVGDRVTITCKASQDVSTAVAWYQQKPGKAPKLLIYSASYRYTGVPDRFTGSGSGTDFTLTISSLQPEDFATYYCQQHYSTPPYTFGCGTKVEIKGGGGQGGGGQGGGGQQVQLVQSGAEVKKPGASVKVSCKASGYAFSSSWMNWVRQAPGQCLEWIGRIYPGDADAKYNAKFKGKATLTADKSTSTAYMELSSLRSEDTAVYYCARSTMIATGAMDYWGQGTLVTVSSGGGGQQVQLVQSGAEVKKPGASVKVSCKASGYTFTNHIIHWVRQAPGQCLEWMGYINPYPGYHAYNEKFQGRATMTSDTSTSTVYMELSSLRSEDTAVYYCARDGYYRDTDVLDYWGQGTLVTVSSGGGGQGGGGQGGGGQEIQMTQSPSSLSASVGDRVTITCQASQDISNYLNWYQQKPGKAPKLLIYYTSRLHTGVPSRFSGSGSGTDFTFTISSLEPEDIATYYCQQGNTLPWTFGCGTKVEIKSGGGGQEVQLVESGGGLVQPGGSLKLSCAASGFTFNKYAMNWVRQAPGKGLEWVARIRSKYNNYATYYADSVKDRFTISRDDSKNTAYLQMNNLKTEDTAVYYCVRHGNFGNSYISYWAYWGQGTLVTVSSGGGGQGGGGQGGGGQQTVVTQEPSLTVSPGGTVTLTCGSSTGAVTSGNYPNWVQQKPGQAPRGLIGGTKFLAPGTPARFSGSLLGGKAALTLSGVQPEDEAEYYCVLWYSNRWVFGGGTKLTVLGGGGCPPCPAPELLGGPSVFLFPPKPKDTLMISRTPEVTCVVVDVSHEEPEVKFNWYVDGVEVHNAKTKPCEEQYGSTYRCVSVLTVLHQDWLNGKEYKCKVSNKALPAPIEKTISKAKGQPREPQVYTLPPSREEMTKNQVSLTCLVKGFYPSDIAVEWESNGQPENNYKTTPPVLDSDGSFFLYSKLTVDKSRWQQGNVFSCSVMHEALHNHYTQKSLSLSPGKGGGGQGGGGQGGGGQGGGGQGGGGQGGGGQCPPCPAPELLGGPSVFLFPPKPKDTLMISRTPEVTCVVVDVSHEEPEVKFNWYVDGVEVHNAKTKPCEEQYGSTYRCVSVLTVLHQDWLNGKEYKCKVSNKALPAPIEKTISKAKGQPREPQVYTLPPSREEMTKNQVSLTCLVKGFYPSDIAVEWESNGQPENNYKTTPPVLDSDGSFFLYSKLTVDKSRWQQGNVFSCSVMHEALHNHYTQKSLSLSPGK

SEQ ID NO: 3757 - protein, 1224 aa, Artificial Sequence
  Synthetic
EIQMTQSPSSLSASVGDRVTITCKASQDVSTAVAWYQQKPGKAPKLLIYSASYRYTGVPDRFTGSGSGTDFTLTISSLQPEDFATYYCQQHYSTPPYTFGCGTKVEIKGGGGQGGGGQGGGGQQVQLVQSGAEVKKPGASVKVSCKASGYAFSSSWMNWVRQAPGQCLEWIGRIYPGDADAKYNAKFKGKATLTADKSTSTAYMELSSLRSEDTAVYYCARSTMIATGAMDYWGQGTLVTVSSGGGGQQVQLVQSGAEVKKPGASVKVSCKASGYTFTNHIIHWVRQAPGQCLEWMGYINPYPGYHAYNEKFQGRATMTSDTSTSTVYMELSSLRSEDTAVYYCARDGYYRDTDVLDYWGQGTLVTVSSGGGGQGGGGQGGGGQEIQMTQSPSSLSASVGDRVTITCQASQDISNYLNWYQQKPGKAPKLLIYYTSRLHTGVPSRFSGSGSGTDFTFTISSLEPEDIATYYCQQGNTLPWTFGCGTKVEIKSGGGGQEVQLVESGGGLVQPGGSLKLSCAASGFTFNKYAMNWVRQAPGKGLEWVARIRSKYNNYATYYADSVKDRFTISRDDSKNTAYLQMNNLKTEDTAVYYCVRHGNFGNSYISYWAYWGQGTLVTVSSGGGGQGGGGQGGGGQQTVVTQEPSLTVSPGGTVTLTCGSSTGAVTSGNYPNWVQQKPGQAPRGLIGGTKFLAPGTPARFSGSLLGGKAALTLSGVQPEDEAEYYCVLWYSNRWVFGGGTKLTVLGGGGCPPCPAPELLGGPSVFLFPPKPKDTLMISRTPEVTCVVVDVSHEEPEVKFNWYVDGVEVHNAKTKPCEEQYGSTYRCVSVLTVLHQDWLNGKEYKCKVSNKALPAPIEKTISKAKGQPREPQVYTLPPSREEMTKNQVSLTCLVKGFYPSDIAVEWESNGQPENNYKTTPPVLDSDGSFFLYSKLTVDKSRWQQGNVFSCSVMHEALHNHYTQKSLSLSPGKGGGGQGGGGQGGGGQGGGGQGGGGQGGGGQCPPCPAPELLGGPSVFLFPPKPKDTLMISRTPEVTCVVVDVSHEEPEVKFNWYVDGVEVHNAKTKPCEEQYGSTYRCVSVLTVLHQDWLNGKEYKCKVSNKALPAPIEKTISKAKGQPREPQVYTLPPSREEMTKNQVSLTCLVKGFYPSDIAVEWESNGQPENNYKTTPPVLDSDGSFFLYSKLTVDKSRWQQGNVFSCSVMHEALHNHYTQKSLSLSPGK

SEQ ID NO: 3758 - protein, 1234 aa, Artificial Sequence
  Synthetic
DIQMTQSPSSLSASVGDRVTITCKASQDVSTAVAWYQQKPGKAPKLLIYSASYRYTGVPDRFTGSGSGTDFTLTISSLQPEDFATYYCQQHYSTPPYTFGCGTKVEIKGGGGSGGGGSGGGGSQVQLVQSGAEVKKPGASVKVSCKASGYAFSSSWMNWVRQAPGQCLEWIGRIYPGDADAKYNAKFKGKATLTADKSTSTAYMELSSLRSEDTAVYYCARSTMIATGAMDYWGQGTLVTVSSGGGGSQVQLVQSGAEVKKPGASVKVSCKASGYTFTNHIIHWVRQAPGQCLEWMGYINPYPGYHAYNEKFQGRATMTSDTSTSTVYMELSSLRSEDTAVYYCARDGYYRDTDVLDYWGQGTLVTVSSGGGGSGGGGSGGGGSDIQMTQSPSSLSASVGDRVTITCQASQDISNYLNWYQQKPGKAPKLLIYYTSRLHTGVPSRFSGSGSGTDFTFTISSLEPEDIATYYCQQGNTLPWTFGCGTKVEIKSGGGGSEVQLVESGGGLVQPGGSLKLSCAASGFTFNKYAINWVRQAPGKGLEWVARIRSKYNNYATYYADAVKDRFTISRDDSKNTVYLQMNNLKTEDTAVYYCARAGNFGSSYISYWAYWGQGTLVTVSSGGGGSGGGGSGGGGSQTVVTQEPSLTVSPGGTVTITCGSSTGAVTSGNYPNWVQKKPGQAPRGLIGGTKFLAPGTPARFSGSLSGGKAALTLSGVQPEDEAEYYCVLWYSNRWVFGSGTKLTVLGGGGDKTHTCPPCPAPELLGGPSVFLFPPKPKDTLMISRTPEVTCVVVDVSHEDPEVKFNWYVDGVEVHNAKTKPCEEQYGSTYRCVSVLTVLHQDWLNGKEYKCKVSNKALPAPIEKTISKAKGQPREPQVYTLPPSREEMTKNQVSLTCLVKGFYPSDIAVEWESNGQPENNYKTTPPVLDSDGSFFLYSKLTVDKSRWQQGNVFSCSVMHEALHNHYTQKSLSLSPGKGGGGSGGGGSGGGGSGGGGSGGGGSGGGGSDKTHTCPPCPAPELLGGPSVFLFPPKPKDTLMISRTPEVTCVVVDVSHEDPEVKFNWYVDGVEVHNAKTKPCEEQYGSTYRCVSVLTVLHQDWLNGKEYKCKVSNKALPAPIEKTISKAKGQPREPQVYTLPPSREEMTKNQVSLTCLVKGFYPSDIAVEWESNGQPENNYKTTPPVLDSDGSFFLYSKLTVDKSRWQQGNVFSCSVMHEALHNHYTQKSLSLSPGK

SEQ ID NO: 3759 - protein, 1224 aa, Artificial Sequence
  Synthetic
DIQMTQSPSSLSASVGDRVTITCKASQDVSTAVAWYQQKPGKAPKLLIYSASYRYTGVPDRFTGSGSGTDFTLTISSLQPEDFATYYCQQHYSTPPYTFGCGTKVEIKGGGGQGGGGQGGGGQQVQLVQSGAEVKKPGASVKVSCKASGYAFSSSWMNWVRQAPGQCLEWIGRIYPGDADAKYNAKFKGKATLTADKSTSTAYMELSSLRSEDTAVYYCARSTMIATGAMDYWGQGTLVTVSSGGGGQQVQLVQSGAEVKKPGASVKVSCKASGYTFTNHIIHWVRQAPGQCLEWMGYINPYPGYHAYNEKFQGRATMTSDTSTSTVYMELSSLRSEDTAVYYCARDGYYRDTDVLDYWGQGTLVTVSSGGGGQGGGGQGGGGQEIQMTQSPSSLSASVGDRVTITCQASQDISNYLNWYQQKPGKAPKLLIYYTSRLHTGVPSRFSGSGSGTDFTFTISSLEPEDIATYYCQQGNTLPWTFGCGTKVEIKSGGGGQEVQLVESGGGLVQPGGSLKLSCAASGFTFNKYAINWVRQAPGKGLEWVARIRSKYNNYATYYADAVKDRFTISRDDSKNTVYLQMNNLKTEDTAVYYCARAGNFGSSYISYWAYWGQGTLVTVSSGGGGQGGGGQGGGGQQTVVTQEPSLTVSPGGTVTITCGSSTGAVTSGNYPNWVQKKPGQAPRGLIGGTKFLAPGTPARFSGSLSGGKAALTLSGVQPEDEAEYYCVLWYSNRWVFGSGTKLTVLGGGGCPPCPAPELLGGPSVFLFPPKPKDTLMISRTPEVTCVVVDVSHEEPEVKFNWYVDGVEVHNAKTKPCEEQYGSTYRCVSVLTVLHQDWLNGKEYKCKVSNKALPAPIEKTISKAKGQPREPQVYTLPPSREEMTKNQVSLTCLVKGFYPSDIAVEWESNGQPENNYKTTPPVLDSDGSFFLYSKLTVDKSRWQQGNVFSCSVMHEALHNHYTQKSLSLSPGKGGGGQGGGGQGGGGQGGGGQGGGGQGGGGQCPPCPAPELLGGPSVFLFPPKPKDTLMISRTPEVTCVVVDVSHEEPEVKFNWYVDGVEVHNAKTKPCEEQYGSTYRCVSVLTVLHQDWLNGKEYKCKVSNKALPAPIEKTISKAKGQPREPQVYTLPPSREEMTKNQVSLTCLVKGFYPSDIAVEWESNGQPENNYKTTPPVLDSDGSFFLYSKLTVDKSRWQQGNVFSCSVMHEALHNHYTQKSLSLSPGK

SEQ ID NO: 3760 - protein, 1224 aa, Artificial Sequence
  Synthetic
EIQMTQSPSSLSASVGDRVTITCKASQDVSTAVAWYQQKPGKAPKLLIYSASYRYTGVPDRFTGSGSGTDFTLTISSLQPEDFATYYCQQHYSTPPYTFGCGTKVEIKGGGGQGGGGQGGGGQQVQLVQSGAEVKKPGASVKVSCKASGYAFSSSWMNWVRQAPGQCLEWIGRIYPGDADAKYNAKFKGKATLTADKSTSTAYMELSSLRSEDTAVYYCARSTMIATGAMDYWGQGTLVTVSSGGGGQQVQLVQSGAEVKKPGASVKVSCKASGYTFTNHIIHWVRQAPGQCLEWMGYINPYPGYHAYNEKFQGRATMTSDTSTSTVYMELSSLRSEDTAVYYCARDGYYRDTDVLDYWGQGTLVTVSSGGGGQGGGGQGGGGQEIQMTQSPSSLSASVGDRVTITCQASQDISNYLNWYQQKPGKAPKLLIYYTSRLHTGVPSRFSGSGSGTDFTFTISSLEPEDIATYYCQQGNTLPWTFGCGTKVEIKSGGGGQEVQLVESGGGLVQPGGSLKLSCAASGFTFNKYAINWVRQAPGKGLEWVARIRSKYNNYATYYADAVKDRFTISRDDSKNTVYLQMNNLKTEDTAVYYCARAGNFGSSYISYWAYWGQGTLVTVSSGGGGQGGGGQGGGGQQTVVTQEPSLTVSPGGTVTITCGSSTGAVTSGNYPNWVQKKPGQAPRGLIGGTKFLAPGTPARFSGSLSGGKAALTLSGVQPEDEAEYYCVLWYSNRWVFGSGTKLTVLGGGGCPPCPAPELLGGPSVFLFPPKPKDTLMISRTPEVTCVVVDVSHEEPEVKFNWYVDGVEVHNAKTKPCEEQYGSTYRCVSVLTVLHQDWLNGKEYKCKVSNKALPAPIEKTISKAKGQPREPQVYTLPPSREEMTKNQVSLTCLVKGFYPSDIAVEWESNGQPENNYKTTPPVLDSDGSFFLYSKLTVDKSRWQQGNVFSCSVMHEALHNHYTQKSLSLSPGKGGGGQGGGGQGGGGQGGGGQGGGGQGGGGQCPPCPAPELLGGPSVFLFPPKPKDTLMISRTPEVTCVVVDVSHEEPEVKFNWYVDGVEVHNAKTKPCEEQYGSTYRCVSVLTVLHQDWLNGKEYKCKVSNKALPAPIEKTISKAKGQPREPQVYTLPPSREEMTKNQVSLTCLVKGFYPSDIAVEWESNGQPENNYKTTPPVLDSDGSFFLYSKLTVDKSRWQQGNVFSCSVMHEALHNHYTQKSLSLSPGK

SEQ ID NO: 3761 - protein, 1241 aa, Artificial Sequence
  Synthetic
DIQMTQSPSSLSASVGDRVTITCKASQDVSTAVAWYQQKPGKAPKLLIYSASYRYTGVPDRFTGSGSGTDFTLTISSLQPEDFATYYCQQHYSTPPYTFGCGTKVEIKRGGGGSGGGGSGGGGSQVQLVQSGAEVKKPGASVKVSCKASGYAFSSSWMNWVRQAPGQCLEWIGRIYPGDADAKYNAKFKGKATLTADKSTSTAYMELSSLRSEDTAVYYCARSTMIATGAMDYWGQGTLVTVSSSGGGGSGGGGSQVQLVQSGAEVKKPGASVKVSCKASGYTFTNHIIHWVRQAPGQCLEWMGYINPYPGYHAYNEKFQGRATMTSDTSTSTVYMELSSLRSEDTAVYYCARDGYYRDTDVLDYWGQGTLVTVSSGGGGSGGGGSGGGGSDIQMTQSPSSLSASVGDRVTITCQASQDISNYLNWYQQKPGKAPKLLIYYTSRLHTGVPSRFSGSGSGTDFTFTISSLEPEDIATYYCQQGNTLPWTFGCGTKVEIKSGGGGSEVQLVESGGGLVQPGGSLKLSCAASGFTFNKYAMNWVRQAPGKGLEWVARIRSKYNNYATYYADSVKDRFTISRDDSKNTAYLQMNNLKTEDTAVYYCVRHGNFGNSYISYWAYWGQGTLVTVSSGGGGSGGGGSGGGGSQTVVTQEPSLTVSPGGTVTLTCGSSTGAVTSGNYPNWVQQKPGQAPRGLIGGTKFLAPGTPARFSGSLLGGKAALTLSGVQPEDEAEYYCVLWYSNRWVFGGGTKLTVLGGGGDKTHTCPPCPAPELLGGPSVFLFPPKPKDTLMISRTPEVTCVVVDVSHEDPEVKFNWYVDGVEVHNAKTKPCEEQYGSTYRCVSVLTVLHQDWLNGKEYKCKVSNKALPAPIEKTISKAKGQPREPQVYTLPPSREEMTKNQVSLTCLVKGFYPSDIAVEWESNGQPENNYKTTPPVLDSDGSFFLYSKLTVDKSRWQQGNVFSCSVMHEALHNHYTQKSLSLSPGKGGGGSGGGGSGGGGSGGGGSGGGGSGGGGSDKTHTCPPCPAPELLGGPSVFLFPPKPKDTLMISRTPEVTCVVVDVSHEDPEVKFNWYVDGVEVHNAKTKPCEEQYGSTYRCVSVLTVLHQDWLNGKEYKCKVSNKALPAPIEKTISKAKGQPREPQVYTLPPSREEMTKNQVSLTCLVKGFYPSDIAVEWESNGQPENNYKTTPPVLDSDGSFFLYSKLTVDKSRWQQGNVFSCSVMHEALHNHYTQKSLSLSPGK

SEQ ID NO: 3762 - protein, 1246 aa, Artificial Sequence
  Synthetic
DIQMTQSPSSLSASVGDRVTITCKASQDVSTAVAWYQQKPGKAPKLLIYSASYRYTGVPDRFTGSGSGTDFTLTISSLQPEDFATYYCQQHYSTPPYTFGCGTKVEIKRGGGGSGGGGSGGGGSQVQLVQSGAEVKKPGASVKVSCKASGYAFSSSWMNWVRQAPGQCLEWIGRIYPGDADAKYNAKFKGKATLTADKSTSTAYMELSSLRSEDTAVYYCARSTMIATGAMDYWGQGTLVTVSSSGGGGSGGGGSGGGGSQVQLVQSGAEVKKPGASVKVSCKASGYTFTNHIIHWVRQAPGQCLEWMGYINPYPGYHAYNEKFQGRATMTSDTSTSTVYMELSSLRSEDTAVYYCARDGYYRDTDVLDYWGQGTLVTVSSGGGGSGGGGSGGGGSDIQMTQSPSSLSASVGDRVTITCQASQDISNYLNWYQQKPGKAPKLLIYYTSRLHTGVPSRFSGSGSGTDFTFTISSLEPEDIATYYCQQGNTLPWTFGCGTKVEIKSGGGGSEVQLVESGGGLVQPGGSLKLSCAASGFTFNKYAMNWVRQAPGKGLEWVARIRSKYNNYATYYADSVKDRFTISRDDSKNTAYLQMNNLKTEDTAVYYCVRHGNFGNSYISYWAYWGQGTLVTVSSGGGGSGGGGSGGGGSQTVVTQEPSLTVSPGGTVTLTCGSSTGAVTSGNYPNWVQQKPGQAPRGLIGGTKFLAPGTPARFSGSLLGGKAALTLSGVQPEDEAEYYCVLWYSNRWVFGGGTKLTVLGGGGDKTHTCPPCPAPELLGGPSVFLFPPKPKDTLMISRTPEVTCVVVDVSHEDPEVKFNWYVDGVEVHNAKTKPCEEQYGSTYRCVSVLTVLHQDWLNGKEYKCKVSNKALPAPIEKTISKAKGQPREPQVYTLPPSREEMTKNQVSLTCLVKGFYPSDIAVEWESNGQPENNYKTTPPVLDSDGSFFLYSKLTVDKSRWQQGNVFSCSVMHEALHNHYTQKSLSLSPGKGGGGSGGGGSGGGGSGGGGSGGGGSGGGGSDKTHTCPPCPAPELLGGPSVFLFPPKPKDTLMISRTPEVTCVVVDVSHEDPEVKFNWYVDGVEVHNAKTKPCEEQYGSTYRCVSVLTVLHQDWLNGKEYKCKVSNKALPAPIEKTISKAKGQPREPQVYTLPPSREEMTKNQVSLTCLVKGFYPSDIAVEWESNGQPENNYKTTPPVLDSDGSFFLYSKLTVDKSRWQQGNVFSCSVMHEALHNHYTQKSLSLSPGK
